(19) United States
(12) Patent Application Publication
(10) Pub. No.: US 2009/0276918 A1
(43) Pub. Date: Nov. 5, 2009

(54) PLANTS HAVING ENHANCED YIELD-RELATED TRAITS AND A METHOD FOR MAKING THE SAME

(75) Inventors: Yang Do Choi, Seoul (KR); Ju-Kon Kim, Seoul (KR); Baek Hie Nahm, Seoul (KR); Jin Seo Jeong, Seoul (KR); Se-Jun Oh, Seoul (KR); Chang-d'eok Han, Seoul (KR); Sung Han Park, Seoul (KR); Pil Joong Chung, Seoul (KR)

Correspondence Address: CONNOLLY BOVE LODGE & HUTZ, LLP, P O BOX 2207, WILMINGTON, DE, 19899, US

(73) Assignees: CROPDESIGN N.V., Zwijnaarde (BE); CROP FUNCTIONAL GENOMICS CENTER, Seoul (KR)

(21) Appl. No.: 12/304,581

(22) PCT Filed: Jun. 15, 2007
(86) PCT No.: PCT/EP2007/005292

§ 371 Date: Dec. 12, 2008

Related U.S. Application Data
(60) Provisional application No. 60/816,447, filed on Jun. 26, 2006.
(60) Provisional application No. 60/816,444, filed on Jun. 26, 2006.
(60) Provisional application No. 60/889,957, filed on Feb. 15, 2007.
(60) Provisional application No. 60/891,045, filed on Feb. 22, 2007.
(60) Provisional application No. 60/891,047, filed on Feb. 22, 2007.

(30) Foreign Application Priority Data
Jun. 15, 2006 (EP) 06447081.8
Jun. 15, 2006 (EP) 06447082.6
Jan. 19, 2007 (EP) 07100862.7
Jan. 31, 2007 (EP) 07101534.1
Jan. 31, 2007 (EP) 07101535.8

(51) Int. Cl. C12N 15/82

(52) U.S. Cl. 800/278

(57) ABSTRACT

The present invention concerns a method for enhancing yield-related traits in plants by modulating expression of a particular type of NAC transcription factor in plants. The particular type of NAC transcription factor is one having an amino acid sequence, which when used in the construction of a NAC phylogenetic tree, tends to cluster with the group of NACs comprising the amino acid sequence represented by SEQ ID NO: 2, SEQ ID NO: 51, SEQ ID NO: 53, SEQ ID NO: 55, SEQ ID NO: 57 or SEQ ID NO: 59 rather than with any other NAC group. The present invention also concerns plants having modulated expression of a nucleic acid encoding such a NAC transcription factor, which plants have enhanced yield-related relative to control plants. The present invention further concerns a method for enhancing yield-related traits in plants by modulating expression in a plant of a nucleic acid encoding an AP2-2 polypeptide. The present invention also concerns plants having modulated expression of a nucleic acid encoding an AP2-2 polypeptide, which plants have enhanced yield-related traits relative to control plants. The present invention further concerns a method for enhancing yield-related traits in plants by modulating expression in a plant of a nucleic acid encoding an APETELA2-70-like (AP2-70-like) polypeptide. The present invention also concerns plants having modulated expression of a nucleic acid encoding an AP2-70-like polypeptide, which plants have enhanced yield-related traits relative to control plants. The invention also provides hitherto unknown NAC, AP2-2 and AP2-70-like-encoding nucleic acids, and constructs comprising the same, useful in performing the methods of the invention. The invention also provides constructs useful in the methods of the invention.

[0001] The present invention relates generally to the field of molecular biology and concerns a method for enhancing various economically important yield-related traits in plants. More specifically, the present invention concerns methods for enhancing yield-related traits in plants by modulating expression in a plant of a nucleic acid encoding a particular type of NAC transcription factor. The present invention also concerns plants having modulated expression of a nucleic acid encoding a NAC transcription factor, which plants have enhanced yield-related traits relative to control plants.

[0002] In addition, the present invention concerns a method for enhancing yield-related traits in plants by modulating expression in a plant of a nucleic acid encoding a Apetala 2-2 (AP2-2) polypeptide. The present invention also concerns plants having modulated expression of a nucleic acid encoding an AP2-2 polypeptide, which plants have enhanced yield-related traits relative to control plants. The present invention also concerns a method for enhancing yield-related traits in plants by modulating expression in a plant of a nucleic acid encoding an APETALA2-70-like (AP2-70-like) polypeptide. The present invention also concerns plants having modulated expression of a nucleic acid encoding an AP2-70-like polypeptide, which plants have enhanced yield-related traits relative to control plants. The invention also provides hitherto unknown AP2-70-like-encoding nucleic acids, and constructs comprising the same, useful in performing the methods of the invention.

[0003] The invention also provides constructs useful in the methods of the invention.

[0004] The ever-increasing world population and the dwindling supply of arable land available for agriculture fuels research towards increasing the efficiency of agriculture. Conventional means for crop and horticultural improvements utilise selective breeding techniques to identify plants having desirable characteristics. However, such selective breeding techniques have several drawbacks, namely that these techniques are typically labour intensive and result in plants that often contain heterogeneous genetic components that may not always result in the desirable trait being passed on from parent plants. Advances in molecular biology have allowed mankind to modify the germplasm of animals and plants. Genetic engineering of plants entails the isolation and manipulation of genetic material (typically in the form of DNA or RNA) and the subsequent introduction of that genetic material into a plant. Such technology has the capacity to deliver crops or plants having various improved economic, agronomic and horticultural traits.

[0005] A trait of particular economic interest is increased yield. Yield is normally defined as the measurable produce of economic value from a crop. This may be defined in terms of quantity and/or quality. Yield is directly dependent on several factors, for example, the number and size of the organs, plant architecture (for example, the number of branches), seed production, leaf senescence and more. Root development, nutrient uptake, stress tolerance and early vigour may also be important factors in determining yield. Optimizing the abovementioned factors may therefore contribute to increasing crop yield.

[0006] Seed yield is a particularly important trait, since the seeds of many plants are important for human and animal nutrition. Crops such as, corn, rice, wheat, canola and soybean account for over half the total human caloric intake, whether through direct consumption of the seeds themselves or through consumption of meat products raised on processed seeds. They are also a source of sugars, oils and many kinds of metabolites used in industrial processes. Seeds contain an embryo (the source of new shoots and roots) and an endosperm (the source of nutrients for embryo growth during germination and during early growth of seedlings). The development of a seed involves many genes, and requires the transfer of metabolites from the roots, leaves and stems into the growing seed. The endosperm, in particular, assimilates the metabolic precursors of carbohydrates, oils and proteins and synthesizes them into storage macromolecules to fill out the grain.

[0007] A further trait of economic importance for many crops is early vigour. Improving early vigour is an important objective of modern rice breeding programs in both temperate and tropical rice cultivars. Long roots are important for proper soil anchorage in water-seeded rice. Where rice is sown directly into flooded fields, and where plants must emerge rapidly through water, longer shoots are associated with vigour. Where drill-seeding is practiced, longer mesocotyls and coleoptiles are important for good seedling emergence. Early vigour may also result from increased plant fitness due to, for example, the plants being better adapted to their environment (i.e. being more able to cope with various abiotic or biotic stress factors). Plants having early vigour also show better establishment of the crop (with the crop growing in a more uniform manner, i.e. with the majority of plants reaching the various stages of development at substantially the same time), and show better growth and often better yield.

[0008] A further important trait is improved abiotic stress tolerance. Abiotic stress is a primary cause of crop loss worldwide, reducing average yields for most major crop plants by more than 50% (Wang et al., Planta (2003) 218: 1-14). Abiotic stresses may be caused by drought, salinity, extremes of temperature, chemical toxicity and oxidative stress. The ability to improve plant tolerance to abiotic stress would be of great economic advantage to farmers worldwide and would allow for the cultivation of crops during adverse conditions and in territories where cultivation of crops may not otherwise be possible.

[0009] The ability to engineer abiotic stress tolerance or early vigour into plants would be of great importance in agriculture, as would the ability to increase plant seed yield, whether through seed number, seed biomass, seed development, seed filling, or any other seed-related trait. Aside form the many applications in agriculture including in the production of ornamental plants, arboriculture, horticulture and forestry, increasing yield would also have many non-agricultural uses, such as in the production of algae for use in bioreactors (for the biotechnological production of substances such as pharmaceuticals, antibodies or vaccines or for the bioconversion of organic waste) and other such areas.

[0010] Transcription factors are usually defined as proteins that show sequence-specific DNA binding and that are capable of activating and/or repressing transcription. The Arabidopsis genome codes for at least 1533 transcriptional regulators, which account for ˜5.9% of its estimated total number of genes. About 45% of these transcription factors are reported to be from families specific to plants (Riechmann et al., 2000 (Science Vol. 290, 2105-2109)).

[0011] The present invention concerns the use of a particular type of NAC transcription factor for enhancing yield-related traits in plants.

[0012] NAC is an acronym derived from the names of the three genes first described as containing a NAC domain, namely NAM (no apical meristem), ATAF1,2 and CUC2 (cup-shaped cotyledon). NAC proteins appear to be widespread in plants, with the genome of Arabidopsis thaliana estimated to contain at least a hundred NAC-encoding genes, but without any examples having been found to date in other eukaryotes (Riechmann et al., 2000).

[0013] The NAC protein family comprises a variety of plant proteins that are identifiable by the presence of a highly conserved N-terminal NAC domain, accompanied by diverse C-terminal domains. The DNA-binding ability of NAC proteins is generally localized to the NAC domain, with the C-terminal regions constituting transcriptional activation domains. Several NAC genes have been found to be hormone inducible. NAC domains have also been implicated in interactions with other proteins, such as viral proteins and RING finger proteins. NAC proteins have also been implicated in transcriptional control in a variety of plant processes, including in the development of the shoot apical meristem and floral organs, and in the formation of lateral roots. NAC proteins have also been implicated in responses to stress and viral infections, Ernst et al., 2004 (EMBO Reports 5, 3, 297-303).

[0014] U.S. Pat. No. 6,844,486 describes a member of the NAC family, NACI, isolated from Arabidopsis thaliana. NACI was reported to be involved in the regulation of cotyledon and lateral root development. Overexpression of the nacI gene was reported to give larger plants with larger roots and more lateral roots than wild-type plants.

[0015] Surprisingly, it has now been found that modulating expression in a plant of a nucleic acid encoding a particular type of NAC transcription factor gives plants having enhanced yield-related traits relative to control plants. The particular class of NAC transcription factor suitable for enhancing yield-related traits in plants is described in detail below.

[0016] The present invention provides a method for enhancing yield-related traits in plants relative to control plants, comprising modulating expression in a plant of a nucleic acid encoding a particular type of NAC transcription factor.

[0017] In addition, the present invention concerns the use of an Apetala type transcription factor, AP2-2, for enhancing yield-related traits in plants.

[0018] AP2 (APETALA2) and EREBPs (ethylene-responsive element binding proteins, or ERF, ethylene response factors) are the prototypic members of a family of transcription factors unique to plants, whose distinguishing characteristic is that they contain the so-called AP2 DNA-binding domain. AP2/EREBP genes form a large multigene family (the AP2/ERF superfamily), and they play a variety of roles throughout the plant life cycle: from being key regulators of several developmental processes, like floral organ identity determination or control of leaf epidermal cell identity, to forming part of the mechanisms used by plants to respond to various types of biotic and environmental stress. Within the AP2/ERF superfamily, 3 large families are discriminated: the AP2 family with two AP2/ERF domains, the ERF family with a single AP2/ERF domain and the RAV family comprising a B3-type DNA binding domain. Nakano et al. (Plant Physiology 140, 411-432, 2006) studied the ERF gene family in Arabidopsis and rice, and divided the Arabidopsis ERF gene family into 12 groups (designated Group I to X, and a Group VI-like and Group Xb-like), whereas in the case of rice 15 groups were discriminated. The Arabidopsis Group VII proteins are characterised by a conserved N-terminal motif, referred to as Conserved Motif VII-1 (CMVII-1). In rice, Group VII comprises more proteins than the Arabidopsis Group VII, and though many conserved motifs are in common between the rice and Arabidopsis Group VII, a separate rice Group VIIb was created for a sequence lacking this typical CMVII-1 motif. Functionally, members of Group VII are described to be involved in osmotic stress and disease responses (for example in WO 2003007699). Ectopic overexpression of tomato JERF3 in tobacco increased the salt tolerance of the transgenics (Wang et al., Plant Molecular Biology 58, 183-192, 2004), and pepper transcription factor CaPF1 overexpression resulted in increased osmotic tolerance in pine (Tang et al, Plant Cell Rep. 26, 115-124, 2007), but also increased pathogen resistance in Arabidopsis (Yi et al., Plant Physiol. 136, 2862-2874, 2004). A similar observation was made for barley HvRAF (Jung et al., Planta Epub 26 Aug. 2006). Furthermore, a Group VII type ERF protein was used in a process for the production of Methionine (EP2005003297).

[0019] Surprisingly, it has now been found that modulating expression in a plant of a nucleic acid encoding a Group VII ERF protein (hereafter named AP2-2 polypeptide) gives plants having enhanced yield-related traits relative to control plants. These enhanced yield-related traits were not the result of increased stress resistance.

[0020] The ERF (Ethylene Response Factor) family is a large gene family of transcription factors and is part of the AP2/ERF superfamily, which also contains the AP2 and RAV families. The AP2/ERF superfamily is defined by the AP2/ERF domain, which consists of about 60 to 70 amino acids and is involved in DNA binding. These three families have been defined as follows. The AP2 family of proteins contain two repeated AP2/ERF domains, the ERF family of proteins contain a single AP2/ERF domain, and the RAV family proteins contain a B3 domain, which is a DNA-binding domain conserved in other plant-specific transcription factors, including VP1/ABI3, in addition to the single AP2/ERF domain. The ERF family is sometimes further divided into two major subfamilies, the ERF subfamily and the CBF/DREB subfamily. 147 genes have been identified in the AP2/ERF superfamily in the Arabidopsis genome, including 122 genes in the ERF family. The AP2 domain was first identified as a repeated motif within the Arabidopsis (Arabidopsis thaliana) AP2 protein, which is involved in flower development. Nakano et al., 2006 (Plant Physiol. Vol. 140, pp. 411-432).

[0021] Nakano et al., 2006 further report that genes in the AP2 family have been shown to participate in the regulation of developmental processes, e.g. flower development, spikelet meristem determinacy, leaf epidermal cell identity, and embryo development. Several proteins in the ERF family have been identified and implicated in many diverse functions in cellular processes, such as hormonal signal transduction, response to biotic and abiotic stresses, and regulation of metabolism, and in developmental processes in various plant species.

[0022] Surprisingly, it has now been found that modulating expression in a plant of a nucleic acid encoding an AP2-70-like polypeptide gives plants having enhanced yield-related traits relative to control plants.

[0023] AP2-70-like polypeptides described herein as being useful in enhancing yield-related traits in plants are classified in Group Ib (A-6) according to the classification system of Nakano et al., 2006. Nakano reports that DBF1 from maize (Zea mays)—a member of Group Ib—has been shown to activate the drought-responsive element 2 (DRE2)-dependent transcription of ABA-responsive rab17 in transiently transformed maize callus. In another Group Ib member, Medicago truncatula WXP1, overexpression of the same was reported to activate wax production in transgenic alfalfa (Medicago sativa).

### DEFINITIONS

### Polypeptide(s)/Protein(s)

[0024] The terms “polypeptide” and “protein” are used interchangeably herein and refer to amino acids in a polymeric form of any length, linked together by peptide bonds.

### Polynucleotide(s)/Nucleic Acid(s)/Nucleic Acid Sequence(s)/Nucleotide Sequence(s)

[0025] The terms “polynucleotide(s)”, “nucleic acid sequence(s)”, “nucleotide sequence(s)”, “nucleic acid(s)”, “nucleic acid molecule” are used interchangeably herein and refer to nucleotides, either ribonucleotides or deoxyribonucleotides or a combination of both, in a polymeric unbranched form of any length.

### Control Plant(s)

[0026] The choice of suitable control plants is a routine part of an experimental setup and may include corresponding wild type plants or corresponding plants without the gene of interest. The control plant is typically of the same plant species or even of the same variety as the plant to be assessed. The control plant may also be a nullizygote of the plant to be assessed. Nullizygotes are individuals missing the transgene by segregation. A “control plant” as used herein refers not only to whole plants, but also to plant parts, including seeds and seed parts.

### Homologue(s)

[0027] “Homologues” of a protein encompass peptides, oligopeptides, polypeptides, proteins and enzymes having amino acid substitutions, deletions and/or insertions relative to the unmodified protein in question and having similar biological and functional activity as the unmodified protein from which they are derived.

[0028] A deletion refers to removal of one or more amino acids from a protein.

[0029] An insertion refers to one or more amino acid residues being introduced into a predetermined site in a protein. Insertions may comprise N-terminal and/or C-terminal fusions as well as intra-sequence insertions of single or multiple amino acids. Generally, insertions within the amino acid sequence will be smaller than N- or C-terminal fusions, of the order of about 1 to 10 residues. Examples of N- or C-terminal fusion proteins or peptides include the binding domain or activation domain of a transcriptional activator as used in the yeast two-hybrid system, phage coat proteins, (histidine)-6-tag, glutathione S-transferase-tag, protein A, maltose-binding protein, dihydrofolate reductase, Tag-100 epitope, c-myc epitope, FLAG®-epitope, lacZ, CMP (calmodulin-binding peptide), HA epitope, protein C epitope and VSV epitope.

[0030] A substitution refers to replacement of amino acids of the protein with other amino acids having similar properties (such as similar hydrophobicity, hydrophilicity, antigenicity, propensity to form or break α-helical structures or β-sheet structures). Amino acid substitutions are typically of single residues, but may be clustered depending upon functional constraints placed upon the polypeptide; insertions will usually be of the order of about 1 to 10 amino acid residues. The amino acid substitutions are preferably conservative amino acid substitutions. Conservative substitution tables are well known in the art (see for example Creighton (1984) Proteins. W.H. Freeman and Company (Eds) and Table 1 below).

TABLE 1
Examples of conserved amino acid substitutions

| | Conservative |
|---|---|
| Residue | Substitutions |
| Ala | Ser |
| Arg | Lys |
| Asn | Gln; His |
| Asp | Glu |
| Gln | Asn |
| Cys | Ser |
| Glu | Asp |
| Gly | Pro |
| His | Asn; Gln |
| Ile | Leu, Val |
| Leu | Ile; Val |
| Lys | Arg; Gln |
| Met | Leu; Ile |
| Phe | Met; Leu; Tyr |
| Ser | Thr; Gly |
| Thr | Ser; Val |
| Trp | Tyr |
| Tyr | Trp; Phe |
| Val | Ile; Leu |

[0031] Amino acid substitutions, deletions and/or insertions may readily be made using peptide synthetic techniques well known in the art, such as solid phase peptide synthesis and the like, or by recombinant DNA manipulation. Methods for the manipulation of DNA sequences to produce substitution, insertion or deletion variants of a protein are well known in the art. For example, techniques for making substitution mutations at predetermined sites in DNA are well known to those skilled in the art and include M13 mutagenesis, T7-Gen in vitro mutagenesis (USB, Cleveland, Ohio), QuickChange Site Directed mutagenesis (Stratagene, San Diego, Calif.), PCR-mediated site-directed mutagenesis or other site-directed mutagenesis protocols.

### Derivatives

[0032] “Derivatives” include peptides, oligopeptides, polypeptides which may, compared to the amino acid sequence of the naturally-occurring form of the protein, such as the protein of interest, comprise substitutions of amino acids with non-naturally occurring amino acid residues, or additions of non-naturally occurring amino acid residues. “Derivatives” of a protein also encompass peptides, oligopeptides, polypeptides which comprise naturally occurring altered (glycosylated, acylated, prenylated, phosphorylated, myristoylated, sulphated etc.) or non-naturally altered amino acid residues compared to the amino acid sequence of a naturally-occurring form of the polypeptide. A derivative may also comprise one or more non-amino acid substituents or additions compared to the amino acid sequence from which it is derived, for example a reporter molecule or other ligand, covalently or non-covalently bound to the amino acid sequence, such as a reporter molecule which is bound to facilitate its detection, and non-naturally occurring amino acid residues relative to the amino acid sequence of a naturally-occurring protein. Furthermore, “derivatives” also include fusions of the naturally-occurring form of the protein with tagging peptides such as FLAG, HIS6 or thioredoxin (for a review of tagging peptides, see Terpe, Appl. Microbiol. Biotechnol. 60, 523-533, 2003).

### Orthologue(s)/Paralogue(s)

[0033] Orthologues and paralogues encompass evolutionary concepts used to describe the ancestral relationships of genes. Paralogues are genes within the same species that have originated through duplication of an ancestral gene; orthologues are genes from different organisms that have originated through speciation, and are also derived from a common ancestral gene.

### Domain

[0034] The term “domain” refers to a set of amino acids conserved at specific positions along an alignment of sequences of evolutionarily related proteins. While amino acids at other positions can vary between homologues, amino acids that are highly conserved at specific positions indicate amino acids that are likely essential in the structure, stability or function of a protein. Identified by their high degree of conservation in aligned sequences of a family of protein homologues, they can be used as identifiers to determine if any polypeptide in question belongs to a previously identified polypeptide family.

### Motif/Consensus Sequence/Signature

[0035] The term “motif” or “consensus sequence” or “signature” refers to a short conserved region in the sequence of evolutionarily related proteins. Motifs are frequently highly conserved parts of domains, but may also include only part of the domain, or be located outside of conserved domain (if all of the amino acids of the motif fall outside of a defined domain).

### Hybridisation

[0036] The term “hybridisation” as defined herein is a process wherein substantially homologous complementary nucleotide sequences anneal to each other. The hybridisation process can occur entirely in solution, i.e. both complementary nucleic acids are in solution. The hybridisation process can also occur with one of the complementary nucleic acids immobilised to a matrix such as magnetic beads, Sepharose beads or any other resin. The hybridisation process can furthermore occur with one of the complementary nucleic acids immobilised to a solid support such as a nitro-cellulose or nylon membrane or immobilised by e.g. photolithography to, for example, a siliceous glass support (the latter known as nucleic acid arrays or microarrays or as nucleic acid chips). In order to allow hybridisation to occur, the nucleic acid molecules are generally thermally or chemically denatured to melt a double strand into two single strands and/or to remove hairpins or other secondary structures from single stranded nucleic acids.

[0037] The term “stringency” refers to the conditions under which a hybridisation takes place. The stringency of hybridisation is influenced by conditions such as temperature, salt concentration, ionic strength and hybridisation buffer composition. Generally, low stringency conditions are selected to be about 30° C. lower than the thermal melting point (Tₘ) for the specific sequence at a defined ionic strength and pH. Medium stringency conditions are when the temperature is 20° C. below Tₘ, and high stringency conditions are when the temperature is 10° C. below Tₘ. High stringency hybridisation conditions are typically used for isolating hybridising sequences that have high sequence similarity to the target nucleic acid sequence. However, nucleic acids may deviate in sequence and still encode a substantially identical polypeptide, due to the degeneracy of the genetic code. Therefore medium stringency hybridisation conditions may sometimes be needed to identify such nucleic acid molecules.

[0038] The Tₘ is the temperature under defined ionic strength and pH, at which 50% of the target sequence hybridises to a perfectly matched probe. The Tₘ is dependent upon the solution conditions and the base composition and length of the probe. For example, longer sequences hybridise specifically at higher temperatures. The maximum rate of hybridisation is obtained from about 16° C. up to 32° C. below Tₘ. The presence of monovalent cations in the hybridisation solution reduce the electrostatic repulsion between the two nucleic acid strands thereby promoting hybrid formation; this effect is visible for sodium concentrations of up to 0.4M (for higher concentrations, this effect may be ignored). Formamide reduces the melting temperature of DNA-DNA and DNA-RNA duplexes with 0.6 to 0.7° C. for each percent formamide, and addition of 50% formamide allows hybridisation to be performed at 30 to 45° C., though the rate of hybridisation will be lowered. Base pair mismatches reduce the hybridisation rate and the thermal stability of the duplexes. On average and for large probes, the Tₘ decreases about 1° C. per % base mismatch. The Tₘ may be calculated using the following equations, depending on the types of hybrids:

1) DNA-DNA hybrids (Meinkoth and Wahl, Anal. Biochem., 138: 267-284, 1984):

Tₘ=81.5° C.+16.6×log₁₀[Na⁺]^{a}+0.41x%[G/C^{b}]−500x[L^{c}]⁻¹−0.61x% formamide

2) DNA-RNA or RNA-RNA hybrids:

Tₘ=79.8+18.5(log₁₀[Na⁺]^{a})+0.58(% G/C^{b})+11.8(% G/C^{b})²−820/L^{c}

3) oligo-DNA or oligo-RNA^{d} hybrids:

For <20 nucleotides: Tₘ=2(Iₙ)

For 20-35 nucleotides: Tₘ=22+1.46(Iₙ)

^{a} or for other monovalent cation, but only accurate in the 0.01-0.4 M range.
^{b} only accurate for % GC in the 30% to 75% range.
^{c} L=length of duplex in base pairs.
^{d} oligo, oligonucleotide; Iₙ=effective length of primer=2×(no. of G/C)+(no. of A/T).

[0039] Non-specific binding may be controlled using any one of a number of known techniques such as, for example, blocking the membrane with protein containing solutions, additions of heterologous RNA, DNA, and SDS to the hybridisation buffer, and treatment with Rnase. For non-homologous probes, a series of hybridizations may be performed by varying one of (i) progressively lowering the annealing temperature (for example from 68° C. to 42° C.) or (ii) progressively lowering the formamide concentration (for example from 50% to 0%). The skilled artisan is aware of various parameters which may be altered during hybridisation and which will either maintain or change the stringency conditions.

[0040] Besides the hybridisation conditions, specificity of hybridisation typically also depends on the function of post-hybridisation washes. To remove background resulting from non-specific hybridisation, samples are washed with dilute salt solutions. Critical factors of such washes include the ionic strength and temperature of the final wash solution: the lower the salt concentration and the higher the wash temperature, the higher the stringency of the wash. Wash conditions are typically performed at or below hybridisation stringency. A positive hybridisation gives a signal that is at least twice of that of the background. Generally, suitable stringent conditions for nucleic acid hybridisation assays or gene amplification detection procedures are as set forth above. More or less stringent conditions may also be selected. The skilled artisan is aware of various parameters which may be altered during washing and which will either maintain or change the stringency conditions.

[0041] For example, typical high stringency hybridisation conditions for DNA hybrids longer than 50 nucleotides encompass hybridisation at 65° C. in 1×SSC or at 42° C. in 1×SSC and 50% formamide, followed by washing at 65° C. in 0.3×SSC. Examples of medium stringency hybridisation conditions for DNA hybrids longer than 50 nucleotides encompass hybridisation at 50° C. in 4×SSC or at 40° C. in 6×SSC and 50% formamide, followed by washing at 50° C. in 2×SSC. The length of the hybrid is the anticipated length for the hybridising nucleic acid. When nucleic acids of known sequence are hybridised, the hybrid length may be determined by aligning the sequences and identifying the conserved regions described herein. 1×SSC is 0.15M NaCl and 15 mM sodium citrate; the hybridisation solution and wash solutions may additionally include 5× Denhardt's reagent, 0.5-1.0% SDS, 100 μg/ml denatured, fragmented salmon sperm DNA, 0.5% sodium pyrophosphate.

[0042] For the purposes of defining the level of stringency, reference can be made to Sambrook et al. (2001) Molecular Cloning: a laboratory manual, 3rd Edition, Cold Spring Harbor Laboratory Press, CSH, New York or to Current Protocols in Molecular Biology, John Wiley & Sons, N.Y. (1989 and yearly updates).

### Splice Variant

[0043] The term “splice variant” as used herein encompasses variants of a nucleic acid sequence in which selected introns and/or exons have been excised, replaced, displaced or added, or in which introns have been shortened or lengthened. Such variants will be ones in which the biological activity of the protein is substantially retained; this may be achieved by selectively retaining functional segments of the protein. Such splice variants may be found in nature or may be manmade. Methods for predicting and isolating such splice variants are well known in the art (see for example Foissac and Schiex (2005) BMC Bioinformatics 6: 25).

### Allelic Variant

[0044] Alleles or allelic variants are alternative forms of a given gene, located at the same chromosomal position. Allelic variants encompass Single Nucleotide Polymorphisms (SNPs), as well as Small Insertion/Deletion Polymorphisms (INDELs). The size of INDELs is usually less than 100 bp. SNPs and INDELs form the largest set of sequence variants in naturally occurring polymorphic strains of most organisms.

### Gene Shuffling/Directed Evolution

[0045] Gene shuffling or directed evolution consists of iterations of DNA shuffling followed by appropriate screening and/or selection to generate variants of nucleic acids or portions thereof encoding proteins having a modified biological activity (Castle et al., (2004) Science 304(5674): 1151-4; U.S. Pat. Nos. 5,811,238 and 6,395,547).

### Regulatory Element/Control Sequence/Promoter

[0046] The terms “regulatory element”, “control sequence” and “promoter” are all used interchangeably herein and are to be taken in a broad context to refer to regulatory nucleic acid sequences capable of effecting expression of the sequences to which they are ligated. The term “promoter” typically refers to a nucleic acid control sequence located upstream from the transcriptional start of a gene and which is involved in recognising and binding of RNA polymerase and other proteins, thereby directing transcription of an operably linked nucleic acid. Encompassed by the aforementioned terms are transcriptional regulatory sequences derived from a classical eukaryotic genomic gene (including the TATA box which is required for accurate transcription initiation, with or without a CCAAT box sequence) and additional regulatory elements (i.e. upstream activating sequences, enhancers and silencers) which alter gene expression in response to developmental and/or external stimuli, or in a tissue-specific manner. Also included within the term is a transcriptional regulatory sequence of a classical prokaryotic gene, in which case it may include a −35 box sequence and/or −10 box transcriptional regulatory sequences. The term “regulatory element” also encompasses a synthetic fusion molecule or derivative that confers, activates or enhances expression of a nucleic acid molecule in a cell, tissue or organ.

[0047] A “plant promoter” comprises regulatory elements, which mediate the expression of a coding sequence segment in plant cells. Accordingly, a plant promoter need not be of plant origin, but may originate from viruses or micro-organisms, for example from viruses which attack plant cells. The “plant promoter” can also originate from a plant cell, e.g. from the plant which is transformed with the nucleic acid sequence to be expressed in the inventive process and described herein. This also applies to other “plant” regulatory signals, such as “plant” terminators. The promoters upstream of the nucleotide sequences useful in the methods of the present invention can be modified by one or more nucleotide substitution(s), insertion(s) and/or deletion(s) without interfering with the functionality or activity of either the promoters, the open reading frame (ORF) or the 3′-regulatory region such as terminators or other 3′ regulatory regions which are located away from the ORF. It is furthermore possible that the activity of the promoters is increased by modification of their sequence, or that they are replaced completely by more active promoters, even promoters from heterologous organisms. For expression in plants, the nucleic acid molecule must, as described above, be linked operably to or comprise a suitable promoter which expresses the gene at the right point in time and with the required spatial expression pattern.

[0048] For the identification of functionally equivalent promoters, the promoter strength and/or expression pattern of a candidate promoter may be analysed for example by operably linking the promoter to a reporter gene and assaying the expression level and pattern of the reporter gene in various tissues of the plant. Suitable well-known reporter genes include for example beta-glucuronidase or beta-galactosidase. The promoter activity is assayed by measuring the enzymatic activity of the beta-glucuronidase or beta-galactosidase. The promoter strength and/or expression pattern may then be compared to that of a reference promoter (such as the one used in the methods of the present invention). Alternatively, promoter strength may be assayed by quantifying mRNA levels or by comparing mRNA levels of the nucleic acid used in the methods of the present invention, with mRNA levels of housekeeping genes such as 18S rRNA, using methods known in the art, such as Northern blotting with densitometric analysis of autoradiograms, quantitative real-time PCR or RT-PCR (Heid et al., 1996 Genome Methods 6: 986-994). Generally by “weak promoter” is intended a promoter that drives expression of a coding sequence at a low level. By “low level” is intended at levels of about 1/10,000 transcripts to about 1/100,000 transcripts, to about 1/500,0000 transcripts per cell. Conversely, a “strong promoter” drives expression of a coding sequence at high level, or at about 1/10 transcripts to about 1/100 transcripts to about 1/1000 transcripts per cell.

### Operably Linked

[0049] The term “operably linked” as used herein refers to a functional linkage between the promoter sequence and the gene of interest, such that the promoter sequence is able to initiate transcription of the gene of interest.

### Constitutive Promoter

[0050] A “constitutive promoter” refers to a promoter that is transcriptionally active during most, but not necessarily all, phases of growth and development and under most environmental conditions, in at least one cell, tissue or organ. Table 2a below gives examples of constitutive promoters.

TABLE 2a
Examples of constitutive promoters

| Gene Source | Reference |
|---|---|
| Actin | McElroy et al, Plant Cell, 2: 163-171, 1990 |
| HMGP | WO 2004/070039 |
| CAMV 35S | Odell et al, Nature, 313: 810-812, 1985 |
| CaMV 19S | Nilsson et al., Physiol. Plant. 100: 456-462, 1997 |
| GOS2 | de Pater et al, Plant J Nov; 2(6): 837-44, 1992, |
| | WO 2004/065596 |
| Ubiquitin | Christensen et al, Plant Mol. Biol. 18: 675-689, 1992 |
| Rice cyclophilin | Buchholz et al, Plant Mol Biol. 25(5): 837-43, 1994 |
| Maize H3 histone | Lepetit et al, Mol. Gen. Genet. 231: 276-285, 1992 |
| Alfalfa H3 | Wu et al. Plant Mol. Biol. 11: 641-649, 1988 |
| histone | |
| Actin 2 | An et al, Plant J. 10(1); 107-121, 1996 |
| 34S FMV | Sanger et al., Plant. Mol. Biol., 14, 1990: 433-443 |
| Rubisco small | U.S. Pat. No. 4,962,028 |
| subunit | |
| OCS | Leisner (1988) Proc Natl Acad Sci USA 85(5): 2553 |
| SAD1 | Jain et al., Crop Science, 39 (6), 1999: 1696 |
| SAD2 | Jain et al., Crop Science, 39 (6), 1999: 1696 |
| nos | Shaw et al. (1984) Nucleic Acids Res. 12(20): |
| | 7831-7846 |
| V-ATPase | WO 01/14572 |
| Super promoter | WO 95/14098 |
| G-box proteins | WO 94/12015 |

### Ubiquitous Promoter

[0051] A ubiquitous promoter is active in substantially all tissues or cells of an organism.

### Developmentally-Regulated Promoter

[0052] A developmentally-regulated promoter is active during certain developmental stages or in parts of the plant that undergo developmental changes.

### Inducible Promoter

[0053] An inducible promoter has induced or increased transcription initiation in response to a chemical (for a review see Gatz 1997, Annu. Rev. Plant Physiol. Plant Mol. Biol., 48:89-108), environmental or physical stimulus, or may be “stress-inducible”, i.e. activated when a plant is exposed to various stress conditions, or a “pathogen-inducible” i.e. activated when a plant is exposed to exposure to various pathogens.

### Organ-specific/Tissue-Specific Promoter

[0054] An organ-specific or tissue-specific promoter is one that is capable of preferentially initiating transcription in certain organs or tissues, such as the leaves, roots, seed tissue etc. For example, a “root-specific promoter” is a promoter that is transcriptionally active predominantly in plant roots, substantially to the exclusion of any other parts of a plant, whilst still allowing for any leaky expression in these other plant parts. Promoters able to initiate transcription in certain cells only are referred to herein as “cell-specific”.

[0055] Examples of root-specific promoters are listed in Table 2b below:

TABLE 2b
Examples of root-specific promoters

| Gene Source | Reference |
|---|---|
| RCc3 | Plant Mol Biol. 1995 Jan; 27(2): 237-48 |
| Arabidopsis phosphate | Kovama et al., 2005 |
| transporter PHT1 | |
| Medicago phosphate | Xiao et al., 2006 |
| transporter | |
| Arabidopsis Pyk10 | Nitz et al. (2001) Plant Sci 161(2): 337-346 |

[0056] A seed-specific promoter is transcriptionally active predominantly in seed tissue, but not necessarily exclusively in seed tissue (in cases of leaky expression). The seed-specific promoter may be active during seed development and/or during germination.

[0057] A green tissue-specific promoter as defined herein is a promoter that is transcriptionally active predominantly in green tissue, substantially to the exclusion of any other parts of a plant, whilst still allowing for any leaky expression in these other plant parts.

[0058] Examples of green tissue-specific promoters which may be used to perform the methods of the invention are shown in Table 2c below.

TABLE 2c
Examples of green tissue-specific promoters

| Gene | Expression | Reference |
|---|---|---|
| Maize Orthophosphate dikinase | Leaf specific | Fukavama et al., 2001 |
| Maize Phosphoenolpyruvate | Leaf specific | Kausch et al., 2001 |
| carboxylase | | |
| Rice Phosphoenolpyruvate | Leaf specific | Liu et al., 2003 |
| carboxylase | | |
| Rice small subunit Rubisco | Leaf specific | Nomura et al., 2000 |
| rice beta expansin EXBP9 | Shoot specific | WO 2004/070039 |
| Pigeonpea small subunit Rubisco | Leaf specific | Panguluri et al., 2005 |
| Pea RBCS3A | Leaf specific | |

[0059] Another example of a tissue-specific promoter is a meristem-specific promoter, which is transcriptionally active predominantly in meristematic tissue, substantially to the exclusion of any other parts of a plant, whilst still allowing for any leaky expression in these other plant parts.

### Terminator

[0060] The term “terminator” encompasses a control sequence which is a DNA sequence at the end of a transcriptional unit which signals 3′ processing and polyadenylation of a primary transcript and termination of transcription. The terminator can be derived from the natural gene, from a variety of other plant genes, or from T-DNA. The terminator to be added may be derived from, for example, the nopaline synthase or octopine synthase genes, or alternatively from another plant gene, or less preferably from any other eukaryotic gene.

### Modulation

[0061] The term “modulation” means in relation to expression or gene expression, a process in which the expression level is changed by said gene expression in comparison to the control plant, preferably the expression level is increased. The original, unmodulated expression may be of any kind of expression of a structural RNA (rRNA, tRNA) or mRNA with subsequent translation. The term “modulating the activity” shall mean any change of the expression of the inventive nucleic acid sequences or encoded proteins, which leads to increased yield and/or increased growth of the plants.

### Expression

[0062] The term “expression” or “gene expression” means the transcription of a specific gene or specific genes or specific genetic construct. The term “expression” or “gene expression” in particular means the transcription of a gene or genes or genetic construct into structural RNA (rRNA, tRNA) or mRNA with or without subsequent translation of the latter into a protein. The process includes transcription of DNA and processing of the resulting mRNA product.

### Increased Expression/Overexpression

[0063] The term “increased expression” or “overexpression” as used herein means any form of expression that is additional to the original wild-type expression level.

[0064] Methods for increasing expression of genes or gene products are well documented in the art and include, for example, overexpression driven by appropriate promoters, the use of transcription enhancers or translation enhancers. Isolated nucleic acids which serve as promoter or enhancer elements may be introduced in an appropriate position (typically upstream) of a non-heterologous form of a polynucleotide so as to upregulate expression of a nucleic acid encoding the polypeptide of interest. For example, endogenous promoters may be altered in vivo by mutation, deletion, and/or substitution (see, Kmiec, U.S. Pat. No. 5,565,350; Zarling et al., WO9322443), or isolated promoters may be introduced into a plant cell in the proper orientation and distance from a gene of the present invention so as to control the expression of the gene.

[0065] If polypeptide expression is desired, it is generally desirable to include a polyadenylation region at the 3′-end of a polynucleotide coding region. The polyadenylation region can be derived from the natural gene, from a variety of other plant genes, or from T-DNA. The 3′ end sequence to be added may be derived from, for example, the nopaline synthase or octopine synthase genes, or alternatively from another plant gene, or less preferably from any other eukaryotic gene.

[0066] An intron sequence may also be added to the 5′ untranslated region (UTR) or the coding sequence of the partial coding sequence to increase the amount of the mature message that accumulates in the cytosol. Inclusion of a spliceable intron in the transcription unit in both plant and animal expression constructs has been shown to increase gene expression at both the mRNA and protein levels up to 1000-fold (Buchman and Berg (1988) Mol. Cell biol. 8: 4395-4405; Callis et al. (1987) Genes Dev 1:1183-1200). Such intron enhancement of gene expression is typically greatest when placed near the 5′ end of the transcription unit. Use of the maize introns Adh1-S intron 1, 2, and 6, the Bronze-1 intron are known in the art. For general information see: The Maize Handbook, Chapter 116, Freeling and Walbot, Eds., Springer, N.Y. (1994).

[0067] Optionally, one or more terminator sequences may be used in the construct introduced into a plant. Additional regulatory elements may include transcriptional as well as translational enhancers. Other control sequences (besides promoter, enhancer, silencer, intron sequences, 3′UTR and/or 5′UTR regions) may be protein and/or RNA stabilizing elements. Such sequences would be known or may readily be obtained by a person skilled in the art.

[0068] The genetic constructs of the invention may further include an origin of replication sequence that is required for maintenance and/or replication in a specific cell type. One example is when a genetic construct is required to be maintained in a bacterial cell as an episomal genetic element (e.g. plasmid or cosmid molecule). Preferred origins of replication include, but are not limited to, the f1-ori and colE1.

### Endogenous Gene

[0069] Reference herein to an “endogenous” gene not only refers to the gene in question as found in a plant in its natural form (i.e., without there being any human intervention), but also refers to that same gene (or a substantially homologous nucleic acid/gene) in an isolated form subsequently (re)introduced into a plant (a transgene). For example, a transgenic plant containing such a transgene may encounter a substantial reduction of the transgene expression and/or substantial reduction of expression of the endogenous gene. The isolated gene may be isolated from an organism or may be manmade, for example by chemical synthesis.

### Decreased Expression

[0070] Reference herein to “decreased expression” or “reduction or substantial elimination” of expression is taken to mean a decrease in endogenous gene expression and/or polypeptide levels and/or polypeptide activity relative to control plants. The reduction or substantial elimination is in increasing order of preference at least 10%, 20%, 30%, 40% or 50%, 60%, 70%, 80%, 85%, 90%, or 95%, 96%, 97%, 98%, 99% or more reduced compared to that of control plants. Reduction or substantial elimination of expression may be achieved using routine tools and techniques known in the art.

### Selectable Marker (Gene)/Reporter Gene

[0071] “Selectable marker”, “selectable marker gene” or “reporter gene” includes any gene that confers a phenotype on a cell in which it is expressed to facilitate the identification and/or selection of cells that are transfected or transformed with a nucleic acid construct of the invention. These marker genes enable the identification of a successful transfer of the nucleic acid molecules via a series of different principles. Suitable markers may be selected from markers that confer antibiotic or herbicide resistance, that introduce a new metabolic trait or that allow visual selection. Examples of selectable marker genes include genes conferring resistance to antibiotics (such as nptII that phosphorylates neomycin and kanamycin, or hpt, phosphorylating hygromycin, or genes conferring resistance to, for example, bleomycin, streptomycin, tetracyclin, chloramphenicol, ampicillin, gentamycin, geneticin (G418), spectinomycin or blasticidin), to herbicides (for example bar which provides resistance to Basta®; aroA or gox providing resistance against glyphosate, or the genes conferring resistance to, for example, imidazolinone, phosphinothricin or sulfonylurea), or genes that provide a metabolic trait (such as manA that allows plants to use mannose as sole carbon source or xylose isomerase for the utilisation of xylose, or antinutritive markers such as the resistance to 2-deoxyglucose). Expression of visual marker genes results in the formation of colour (for example β-glucuronidase, GUS or β-galactosidase with its coloured substrates, for example X-Gal), luminescence (such as the luciferin/luciferase system) or fluorescence (Green Fluorescent Protein, GFP, and derivatives thereof). This list represents only a small number of possible markers. The skilled worker is familiar with such markers. Different markers are preferred, depending on the organism and the selection method.

[0072] It is known that upon stable or transient integration of nucleic acids into plant cells, only a minority of the cells takes up the foreign DNA and, if desired, integrates it into its genome, depending on the expression vector used and the transfection technique used. To identify and select these integrants, a gene coding for a selectable marker (such as the ones described above) is usually introduced into the host cells together with the gene of interest. These markers can for example be used in mutants in which these genes are not functional by, for example, deletion by conventional methods. Furthermore, nucleic acid molecules encoding a selectable marker can be introduced into a host cell on the same vector that comprises the sequence encoding the polypeptides of the invention or used in the methods of the invention, or else in a separate vector. Cells which have been stably transfected with the introduced nucleic acid can be identified for example by selection (for example, cells which have integrated the selectable marker survive whereas the other cells die).

[0073] Since the marker genes, particularly genes for resistance to antibiotics and herbicides, are no longer required or are undesired in the transgenic host cell once the nucleic acids have been introduced successfully, the process according to the invention for introducing the nucleic acids advantageously employs techniques which enable the removal or excision of these marker genes. One such a method is what is known as co-transformation. The co-transformation method employs two vectors simultaneously for the transformation, one vector bearing the nucleic acid according to the invention and a second bearing the marker gene(s). A large proportion of transformants receives or, in the case of plants, comprises (up to 40% or more of the transformants), both vectors. In case of transformation with Agrobacteria, the transformants usually receive only a part of the vector, i.e. the sequence flanked by the T-DNA, which usually represents the expression cassette. The marker genes can subsequently be removed from the transformed plant by performing crosses. In another method, marker genes integrated into a transposon are used for the transformation together with desired nucleic acid (known as the Ac/Ds technology). The transformants can be crossed with a transposase source or the transformants are transformed with a nucleic acid construct conferring expression of a transposase, transiently or stable. In some cases (approx. 10%), the transposon jumps out of the genome of the host cell once transformation has taken place successfully and is lost. In a further number of cases, the transposon jumps to a different location. In these cases the marker gene must be eliminated by performing crosses. In microbiology, techniques were developed which make possible, or facilitate, the detection of such events. A further advantageous method relies on what is known as recombination systems; whose advantage is that elimination by crossing can be dispensed with. The best-known system of this type is what is known as the Cre/lox system. Cre1 is a recombinase that removes the sequences located between the loxP sequences. If the marker gene is integrated between the loxP sequences, it is removed once transformation has taken place successfully, by expression of the recombinase. Further recombination systems are the HIN/HIX, FLP/FRT and REP/STB system (Tribble et al., J. Biol. Chem., 275, 2000: 22255-22267; Velmurugan et al., J. Cell Biol., 149, 2000: 553-566). A site-specific integration into the plant genome of the nucleic acid sequences according to the invention is possible. Naturally, these methods can also be applied to microorganisms such as yeast, fungi or bacteria.

### Transgenic/Transgene/Recombinant

[0074] For the purposes of the invention, “transgenic”, “transgene” or “recombinant” means with regard to, for example, a nucleic acid sequence, an expression cassette, gene construct or a vector comprising the nucleic acid sequence or an organism transformed with the nucleic acid sequences, expression cassettes or vectors according to the invention, all those constructions brought about by recombinant methods in which either

(a) the nucleic acid sequences encoding proteins useful in the methods of the invention, or
(b) genetic control sequence(s) which is operably linked with the nucleic acid sequence according to the invention, for example a promoter, or
(c) a) and b)
are not located in their natural genetic environment or have been modified by recombinant methods, it being possible for the modification to take the form of, for example, a substitution, addition, deletion, inversion or insertion of one or more nucleotide residues. The natural genetic environment is understood as meaning the natural genomic or chromosomal locus in the original plant or the presence in a genomic library. In the case of a genomic library, the natural genetic environment of the nucleic acid sequence is preferably retained, at least in part. The environment flanks the nucleic acid sequence at least on one side and has a sequence length of at least 50 bp, preferably at least 500 bp, especially preferably at least 1000 bp, most preferably at least 5000 bp. A naturally occurring expression cassette—for example the naturally occurring combination of the natural promoter of the nucleic acid sequences with the corresponding nucleic acid sequence encoding a polypeptide useful in the methods of the present invention, as defined above—becomes a transgenic expression cassette when this expression cassette is modified by non-natural, synthetic (“artificial”) methods such as, for example, mutagenic treatment. Suitable methods are described, for example, in U.S. Pat. No. 5,565,350 or WO 00/15815.

[0075] A transgenic plant for the purposes of the invention is thus understood as meaning, as above, that the nucleic acids used in the method of the invention are not at their natural locus in the genome of said plant, it being possible for the nucleic acids to be expressed homologously or heterologously. However, as mentioned, transgenic also means that, while the nucleic acids according to the invention or used in the inventive method are at their natural position in the genome of a plant, the sequence has been modified with regard to the natural sequence, and/or that the regulatory sequences of the natural sequences have been modified. Transgenic is preferably understood as meaning the expression of the nucleic acids according to the invention at an unnatural locus in the genome, i.e. homologous or, preferably, heterologous expression of the nucleic acids takes place. Preferred transgenic plants are mentioned herein.

### Transformation

[0076] The term “introduction” or “transformation” as referred to herein encompasses the transfer of an exogenous polynucleotide into a host cell, irrespective of the method used for transfer. Plant tissue capable of subsequent clonal propagation, whether by organogenesis or embryogenesis, may be transformed with a genetic construct of the present invention and a whole plant regenerated there from. The particular tissue chosen will vary depending on the clonal propagation systems available for, and best suited to, the particular species being transformed. Exemplary tissue targets include leaf disks, pollen, embryos, cotyledons, hypocotyls, megagametophytes, callus tissue, existing meristematic tissue (e.g., apical meristem, axillary buds, and root meristems), and induced meristem tissue (e.g., cotyledon meristem and hypocotyl meristem). The polynucleotide may be transiently or stably introduced into a host cell and may be maintained non-integrated, for example, as a plasmid. Alternatively, it may be integrated into the host genome. The resulting transformed plant cell may then be used to regenerate a transformed plant in a manner known to persons skilled in the art.

[0077] The transfer of foreign genes into the genome of a plant is called transformation. Transformation of plant species is now a fairly routine technique. Advantageously, any of several transformation methods may be used to introduce the gene of interest into a suitable ancestor cell. The methods described for the transformation and regeneration of plants from plant tissues or plant cells may be utilized for transient or for stable transformation. Transformation methods include the use of liposomes, electroporation, chemicals that increase free DNA uptake, injection of the DNA directly into the plant, particle gun bombardment, transformation using viruses or pollen and microprojection. Methods may be selected from the calcium/polyethylene glycol method for protoplasts (Krens, F. A. et al., (1982) Nature 296, 72-74; Negrutiu I et al. (1987) Plant Mol Biol 8: 363-373); electroporation of protoplasts (Shillito R. D. et al. (1985) Bio/Technol 3, 1099-1102); microinjection into plant material (Crossway A et al., (1986) Mol. Gen Genet 202: 179-185); DNA or RNA-coated particle bombardment (Klein T M et al., (1987) Nature 327: 70) infection with (non-integrative) viruses and the like. Transgenic plants, including transgenic crop plants, are preferably produced via Agrobacterium-mediated transformation. An advantageous transformation method is the transformation in planta. To this end, it is possible, for example, to allow the agrobacteria to act on plant seeds or to inoculate the plant meristem with agrobacteria. It has proved particularly expedient in accordance with the invention to allow a suspension of transformed agrobacteria to act on the intact plant or at least on the flower primordia. The plant is subsequently grown on until the seeds of the treated plant are obtained (Clough and Bent, Plant J. (1998) 16, 735-743). Methods for Agrobacterium-mediated transformation of rice include well known methods for rice transformation, such as those described in any of the following: European patent application EP 1198985 A1, Aldemita and Hodges (Planta 199: 612-617, 1996); Chan et al. (Plant Mol Biol 22 (3): 491-506, 1993), Hiei et al. (Plant J 6 (2): 271-282, 1994), which disclosures are incorporated by reference herein as if fully set forth. In the case of corn transformation, the preferred method is as described in either Ishida et al. (Nat. Biotechnol 14(6): 745-50, 1996) or Frame et al. (Plant Physiol 129(1): 13-22, 2002), which disclosures are incorporated by reference herein as if fully set forth. Said methods are further described by way of example in B. Jenes et al., Techniques for Gene Transfer, in: Transgenic Plants, Vol. 1, Engineering and Utilization, eds. S. D. Kung and R. Wu, Academic Press (1993) 128-143 and in Potrykus Annu. Rev. Plant Physiol. Plant Molec. Biol. 42 (1991) 205-225). The nucleic acids or the construct to be expressed is preferably cloned into a vector, which is suitable for transforming Agrobacterium tumefaciens, for example pBin19 (Bevan et al., Nucl. Acids Res. 12 (1984) 8711). Agrobacteria transformed by such a vector can then be used in known manner for the transformation of plants, such as plants used as a model, like Arabidopsis (Arabidopsis thaliana is within the scope of the present invention not considered as a crop plant), or crop plants such as, by way of example, tobacco plants, for example by immersing bruised leaves or chopped leaves in an agrobacterial solution and then culturing them in suitable media. The transformation of plants by means of Agrobacterium tumefaciens is described, for example, by Höfgen and Willmitzer in Nucl. Acid Res. (1988) 16, 9877 or is known inter alia from F. F. White, Vectors for Gene Transfer in Higher Plants; in Transgenic Plants, Vol. 1, Engineering and Utilization, eds. S. D. Kung and R. Wu, Academic Press, 1993, pp. 15-38.

[0078] In addition to the transformation of somatic cells, which then have to be regenerated into intact plants, it is also possible to transform the cells of plant meristems and in particular those cells which develop into gametes. In this case, the transformed gametes follow the natural plant development, giving rise to transgenic plants. Thus, for example, seeds of Arabidopsis are treated with agrobacteria and seeds are obtained from the developing plants of which a certain proportion is transformed and thus transgenic [Feldman, K A and Marks M D (1987). Mol Gen Genet 208:274-289; Feldmann K (1992). In: C Koncz, N-H Chua and J Shell, eds, Methods in Arabidopsis Research. Word Scientific, Singapore, pp. 274-289]. Alternative methods are based on the repeated removal of the inflorescences and incubation of the excision site in the center of the rosette with transformed agrobacteria, whereby transformed seeds can likewise be obtained at a later point in time (Chang (1994). Plant J. 5: 551-558; Katavic (1994). Mol Gen Genet, 245: 363-370). However, an especially effective method is the vacuum infiltration method with its modifications such as the “floral dip” method. In the case of vacuum infiltration of Arabidopsis, intact plants under reduced pressure are treated with an agrobacterial suspension [Bechthold, N (1993). C R Acad Sci Paris Life Sci, 316: 1194-1199], while in the case of the “floral dip” method the developing floral tissue is incubated briefly with a surfactant-treated agrobacterial suspension [Clough, S J and Bent A F (1998) The Plant J. 16, 735-743]. A certain proportion of transgenic seeds are harvested in both cases, and these seeds can be distinguished from non-transgenic seeds by growing under the above-described selective conditions. In addition the stable transformation of plastids is of advantages because plastids are inherited maternally is most crops reducing or eliminating the risk of transgene flow through pollen. The transformation of the chloroplast genome is generally achieved by a process which has been schematically displayed in Klaus et al., 2004 [Nature Biotechnology 22 (2), 225-229]. Briefly the sequences to be transformed are cloned together with a selectable marker gene between flanking sequences homologous to the chloroplast genome. These homologous flanking sequences direct site specific integration into the plastome. Plastidal transformation has been described for many different plant species and an overview is given in Bock (2001) Transgenic plastids in basic research and plant biotechnology. J Mol Biol. 2001 Sep. 21; 312 (3):425-38 or Maliga, P (2003) Progress towards commercialization of plastid transformation technology. Trends Biotechnol. 21, 20-28. Further biotechnological progress has recently been reported in form of marker free plastid transformants, which can be produced by a transient co-integrated maker gene (Klaus et al., 2004, Nature Biotechnology 22(2), 225-229).

### T-DNA Activation Tagginq

[0079] T-DNA activation tagging (Hayashi et al. Science (1992) 1350-1353), involves insertion of T-DNA, usually containing a promoter (may also be a translation enhancer or an intron), in the genomic region of the gene of interest or 10 kb up- or downstream of the coding region of a gene in a configuration such that the promoter directs expression of the targeted gene. Typically, regulation of expression of the targeted gene by its natural promoter is disrupted and the gene falls under the control of the newly introduced promoter. The promoter is typically embedded in a T-DNA. This T-DNA is randomly inserted into the plant genome, for example, through Agrobacterium infection and leads to modified expression of genes near the inserted T-DNA. The resulting transgenic plants show dominant phenotypes due to modified expression of genes close to the introduced promoter.

### TILLING

[0080] The term “TILLING” is an abbreviation of “Targeted Induced Local Lesions In Genomes” and refers to a mutagenesis technology useful to generate and/or identify nucleic acids encoding proteins with modified expression and/or activity. TILLING also allows selection of plants carrying such mutant variants. These mutant variants may exhibit modified expression, either in strength or in location or in timing (if the mutations affect the promoter for example). These mutant variants may exhibit higher activity than that exhibited by the gene in its natural form. TILLING combines high-density mutagenesis with high-throughput screening methods. The steps typically followed in TILLING are: (a) EMS mutagenesis (Redei G P and Koncz C (1992) In Methods in Arabidopsis Research, Koncz C, Chua N H, Schell J, eds. Singapore, World Scientific Publishing Co, pp. 16-82; Feldmann et al., (1994) In Meyerowitz E M, Somerville C R, eds, Arabidopsis. Cold Spring Harbor Laboratory Press, Cold Spring Harbor, N.Y., pp 137-172; Lightner J and Caspar T (1998) In J Martinez-Zapater, J Salinas, eds, Methods on Molecular Biology, Vol. 82. Humana Press, Totowa, N.J., pp 91-104); (b) DNA preparation and pooling of individuals; (c) PCR amplification of a region of interest; (d) denaturation and annealing to allow formation of heteroduplexes; (e) DHPLC, where the presence of a heteroduplex in a pool is detected as an extra peak in the chromatogram; (f) identification of the mutant individual; and (g) sequencing of the mutant PCR product. Methods for TILLING are well known in the art (McCallum et al., (2000) Nat Biotechnol 18: 455-457; reviewed by Stemple (2004) Nat Rev Genet 5(2): 145-50).

### Homologous Recombination

[0081] Homologous recombination allows introduction in a genome of a selected nucleic acid at a defined selected position. Homologous recombination is a standard technology used routinely in biological sciences for lower organisms such as yeast or the moss Physcomitrella. Methods for performing homologous recombination in plants have been described not only for model plants (Offring a et al. (1990) EMBO J 9(10): 3077-84) but also for crop plants, for example rice (Terada et al. (2002) Nat Biotech 20(10): 1030-4; Iida and Terada (2004) Curr Opin Biotech 15(2): 132-8).

### Yield

[0082] The term “yield” in general means a measurable produce of economic value, typically related to a specified crop, to an area, and to a period of time. Individual plant parts directly contribute to yield based on their number, size and/or weight, or the actual yield is the yield per acre for a crop and year, which is determined by dividing total production (includes both harvested and appraised production) by planted acres. The term “yield” of a plant may relate to vegetative biomass (root and/or shoot biomass), to reproductive organs, and/or to propagules (such as seeds) of that plant.

[0083] Taking corn as an example, a yield increase may be manifested as one or more of the following: increase in the number of plants established per hectare or acre, an increase in the number of ears per plant, an increase in the number of rows, number of kernels per row, kernel weight, thousand kernel weight, ear length/diameter, increase in the seed filling rate (which is the number of filled seeds divided by the total number of seeds and multiplied by 100), among others. Taking rice as an example, a yield increase may manifest itself as an increase in one or more of the following: number of plants per hectare or acre, number of panicles per plant, number of spikelets per panicle, number of flowers (florets) per panicle (which is expressed as a ratio of the number of filled seeds over the number of primary panicles), increase in the seed filling rate (which is the number of filled seeds divided by the total number of seeds and multiplied by 100), increase in thousand kernel weight, among others.

### Early Vigour

[0084] “Early vigour” refers to active healthy well-balanced growth especially during early stages of plant growth, and may result from increased plant fitness due to, for example, the plants being better adapted to their environment (i.e. optimizing the use of energy resources and partitioning between shoot and root). Plants having early vigour also show increased seedling survival and a better establishment of the crop, which often results in highly uniform fields (with the crop growing in uniform manner, i.e. with the majority of plants reaching the various stages of development at substantially the same time), and often better and higher yield. Therefore, early vigour may be determined by measuring various factors, such as thousand kernel weight, percentage germination, percentage emergence, seedling growth, seedling height, root length, root and shoot biomass and many more.

### Increase/Improve/Enhance

[0085] The terms “increase”, “improve” or “enhance” are interchangeable and shall mean in the sense of the application at least a 3%, 4%, 5%, 6%, 7%, 8%, 9% or 10%, preferably at least 15% or 20%, more preferably 25%, 30%, 35% or 40% more yield and/or growth in comparison to control plants as defined herein.

### Greenness Index

[0086] The “greenness index” as used herein is calculated from digital images of plants. For each pixel belonging to the plant object on the image, the ratio of the green value versus the red value (in the RGB model for encoding color) is calculated. The greenness index is expressed as the percentage of pixels for which the green-to-red ratio exceeds a given threshold. Under normal growth conditions, under salt stress growth conditions, and under reduced nutrient availability growth conditions, the greenness index of plants is measured in the last imaging before flowering. In contrast, under drought stress growth conditions, the greenness index of plants is measured in the first imaging after drought.

### Seed Yield

[0087] Increased seed yield may manifest itself as one or more of the following: a) an increase in seed biomass (total seed weight) which may be on an individual seed basis and/or per plant and/or per hectare or acre; b) increased number of flowers per plant; c) increased number of (filled) seeds; d) increased seed filling rate (which is expressed as the ratio between the number of filled seeds divided by the total number of seeds; e) increased harvest index, which is expressed as a ratio of the yield of harvestable parts, such as seeds, divided by the total biomass; and f) increased thousand kernel weight (TKW), which is extrapolated from the number of filled seeds counted and their total weight. An increased TKW may result from an increased seed size and/or seed weight, and may also result from an increase in embryo and/or endosperm size.

[0088] An increase in seed yield may also be manifested as an increase in seed size and/or seed volume. Furthermore, an increase in seed yield may also manifest itself as an increase in seed area and/or seed length and/or seed width and/or seed perimeter. Increased yield may also result in modified architecture, or may occur because of modified architecture.

### Increased Growth Rate

[0089] Since the transgenic plants according to the present invention have increased yield, it is likely that these plants exhibit an increased growth rate (during at least part of their life cycle), relative to the growth rate of corresponding wild type plants at a corresponding stage in their life cycle. Besides the increased yield capacity, an increased efficiency of nutrient uptake may also contribute to the increase in yield. It is observed that the plants according to the present invention show a higher efficiency in nutrient uptake. Increased efficiency of nutrient uptake allows better growth of the plant, whether the plant is under stress or non-stress conditions.

[0090] The increased growth rate may be specific to one or more parts of a plant (including seeds), or may be throughout substantially the whole plant. A plant having an increased growth rate may even exhibit early flowering. The increase in growth rate may take place at one or more stages in the life cycle of a plant or during substantially the whole plant life cycle. Increased growth rate during the early stages in the life cycle of a plant may reflect enhanced vigour (increased seedling vigor at emergence). The increase in growth rate may alter the harvest cycle of a plant allowing plants to be sown later and/or harvested sooner than would otherwise be possible. If the growth rate is sufficiently increased, it may allow for the further sowing of seeds of the same plant species (for example sowing and harvesting of rice plants followed by sowing and harvesting of further rice plants all within one conventional growing period). Similarly, if the growth rate is sufficiently increased, it may allow for the further sowing of seeds of different plants species (for example the sowing and harvesting of rice plants followed by, for example, the sowing and optional harvesting of soy bean, potato or any other suitable plant). Harvesting additional times from the same rootstock in the case of some crop plants may also be possible. Altering the harvest cycle of a plant may lead to an increase in annual biomass production per acre (due to an increase in the number of times (say in a year) that any particular plant may be grown and harvested). An increase in growth rate may also allow for the cultivation of transgenic plants in a wider geographical area than their wild-type counterparts, since the territorial limitations for growing a crop are often determined by adverse environmental conditions either at the time of planting (early season) or at the time of harvesting (late season). Such adverse conditions may be avoided if the harvest cycle is shortened. The growth rate may be determined by deriving various parameters from growth curves, such parameters may be: T-Mid (the time taken for plants to reach 50% of their maximal size) and T-90 (time taken for plants to reach 90% of their maximal size), amongst others.

[0091] An increase in yield and/or growth rate occurs whether the plant is under non-stress conditions or whether the plant is exposed to various stresses compared to control plants. Plants typically respond to exposure to stress by growing more slowly. In conditions of severe stress, the plant may even stop growing altogether. Mild stress on the other hand is defined herein as being any stress to which a plant is exposed which does not result in the plant ceasing to grow altogether without the capacity to resume growth. Mild stress in the sense of the invention leads to a reduction in the growth of the stressed plants of less than 40%, 35% or 30%, preferably less than 25%, 20% or 15%, more preferably less than 14%, 13%, 12%, 11% or 10% or less in comparison to the control plant under non-stress conditions. Due to advances in agricultural practices (irrigation, fertilization, pesticide treatments) severe stresses are not often encountered in cultivated crop plants. As a consequence, the compromised growth induced by mild stress is often an undesirable feature for agriculture. Mild stresses are the everyday biotic and/or abiotic (environmental) stresses to which a plant is exposed. Abiotic stresses may be due to drought or excess water, anaerobic stress, salt stress, chemical toxicity, oxidative stress and hot, cold or freezing temperatures. The abiotic stress may be an osmotic stress caused by a water stress (particularly due to drought), salt stress, oxidative stress or an ionic stress. Biotic stresses are typically those stresses caused by pathogens, such as bacteria, viruses, fungi and insects.

[0092] In particular, the methods of the present invention may be performed under non-stress conditions to give plants having increased yield relative to control plants. As reported in Wang et al. (Planta (2003) 218: 1-14), abiotic stress leads to a series of morphological, physiological, biochemical and molecular changes that adversely affect plant growth and productivity. Drought, salinity, extreme temperatures and oxidative stress are known to be interconnected and may induce growth and cellular damage through similar mechanisms. Rabbani et al. (Plant Physiol (2003) 133: 1755-1767) describes a particularly high degree of “cross talk” between drought stress and high-salinity stress. For example, drought and/or salinisation are manifested primarily as osmotic stress, resulting in the disruption of homeostasis and ion distribution in the cell. Oxidative stress, which frequently accompanies high or low temperature, salinity or drought stress may cause denaturing of functional and structural proteins. As a consequence, these diverse environmental stresses often activate similar cell signaling pathways and cellular responses, such as the production of stress proteins, up-regulation of anti-oxidants, accumulation of compatible solutes and growth arrest. The term “non-stress” conditions as used herein are those environmental conditions that allow optimal growth of plants. Persons skilled in the art are aware of normal soil conditions and climatic conditions for a given location.

### Plant

[0093] The term “plant” as used herein encompasses whole plants, ancestors and progeny of the plants and plant parts, including seeds, shoots, stems, leaves, roots (including tubers), flowers, and tissues and organs, wherein each of the aforementioned comprise the gene/nucleic acid of interest. The term “plant” also encompasses plant cells, suspension cultures, callus tissue, embryos, meristematic regions, gametophytes, sporophytes, pollen and microspores, again wherein each of the aforementioned comprises the gene/nucleic acid of interest.

[0094] Plants that are particularly useful in the methods of the invention include all plants which belong to the superfamily Viridiplantae, in particular monocotyledonous and dicotyledonous plants including fodder or forage legumes, ornamental plants, food crops, trees or shrubs selected from the list comprising Acacia spp., Acer spp., Actinidia spp., Aesculus spp., Agathis australis, Albizia amara, Alsophila tricolor, Andropogon spp., Arachis spp, Areca catechu, Astelia fragrans, Astragalus cicer, Abelmoschus spp., Agave sisalana, Agropyron spp., Agrostis stolonifera, Allium spp., Amaranthus spp., Ammophila arenaria, Ananas comosus, Annona spp., Apium graveolens, Artocarpus spp., Asparagus officinalis, Avena spp. (e.g. Avena sativa, Avena fatua, Avena byzantina, Avena fatua var. sativa, Avena hybrida), Averrhoa carambola Baikiaea pluriuga, Betula spp., Bruguiera gymnorrhiza, Burkea africana, Butea frondosa, Bambusa sp., Benincasa hispida, Bertholletia excelsea, Beta vulgaris, Brassica spp. (e.g. Brassica napus, Brassica rapa ssp. [canola, oilseed rape, turnip rape]), Cadaba farinosa, Calliandra spp, Camellia sinensis, Canna indica, Capsicum spp., Cassia spp., Centroema pubescens, Chaenomeles spp., Cinnamomum cassia, Coffea arabica, Colophospermum mopane, Coronillia varia, Cotoneaster serotina, Crataegus spp., Cucumis spp., Cupressus spp., Cyathea dealbata, Cydonia oblonga, Cryptomeria japonica, Cymbopogon spp., Cynthea dealbata, Cydonia oblonga, Cadaba farinosa, Camellia sinensis, Cannabis sativa, Capsicum spp., Carex elata, Carica papaya, Carissa macrocarpa, Carya spp., Carthamus tinctorius, Castanea spp., Ceiba pentandra, Cichorium endivia, Cinnamomum spp., Citrullus lanatus, Citrus spp., Cocos spp., Coffea spp., Colocasia esculenta, Cola spp., Corchorus sp., Coriandrum sativum, Corylus spp., Crataegus spp., Crocus sativus, Cucurbita spp., Cynara spp., Dalbergia monetaria, Davallia divaricata, Desmodium spp., Dicksonia squarosa, Diheteropogon amplectens, Dioclea spp, Dolichos spp., Dorycnium rectum, Daucus carota, Dimocarpus longan, Dioscorea spp., Diospyros spp., Echinochloa pyramidalis, Ehrartia spp., Eleusine coracana, Eragrestis spp., Erythrina spp., Eucalyptus spp., Euclea schimperi, Eulalia villosa, Elaeis (e.g. Elaeis guineensis, Elaeis oleifera), Erianthus sp., Eriobotrya japonica, Eugenia uniflora, Fagopyrum spp., Feijoa sellowiana, Fragaria spp., Flemingia spp, Freycinetia banksii, Fagus spp., Festuca arundinacea, Ficus carica, Fortunella spp., Fragaria spp., Geranium thunbergii, Ginkgo biloba, Glycine spp. (e.g. Glycine max, Soja hispida or Soja max), Glycine javanica, Gliricidia spp, Gossypium hirsutum, Grevillea spp., Guibourtia coleosperma, Gossypium hirsutum, Helianthus spp. (e.g. Helianthus annuus), Hemerocallis fulva, Hedysarum spp., Hemarthia altissima, Heteropogon contortus, Hibiscus spp., Hordeum spp. (e.g. Hordeum vulgare), Hyparrhenia rufa, Hypericum erectum, Hyperthelia dissoluta, Indigo incarnata, Iris spp., Ipomoea batatas, Juglans spp., Leptarrhena pyrolifolia, Lespediza spp., Lettuca spp., Leucaena leucocephala, Loudetia simplex, Lotonus bainesi, Lotus spp., Lactuca sativa, Lathyrus spp., Lens culinaris, Linum usitatissimum, Litchi chinensis, Luffa acutangula, Lupinus spp., Luzula sylvatica, Lycopersicon spp. (e.g. Lycopersicon esculentum, Lycopersicon lycopersicum, Lycopersicon pyriforme), Macrotyloma spp., Macrotyloma axillare, Malus spp., Malus spp., Malpighia emarginata, Mammea americana, Mangifera indica, Manihot spp., Manihot esculenta, Medicago sativa, Metasequoia glyptostroboides, Manilkara zapota, Medicago sativa, Melilotus spp., Mentha spp., Miscanthus sinensis, Momordica spp., Morus nigra, Musa spp., Musa sapientum, Nicotianum spp., Onobrychis spp., Ornithopus spp., Peltophorum africanum, Pennisetum spp., Olea spp., Opuntia spp., Oryza spp. (e.g. Oryza sativa, Oryza latifolia), Panicum miliaceum, Panicum virgatum, Passiflora edulis, Pastinaca sativa, Pennisetum sp., Persea spp., Persea gratissima, Petunia spp., Phaseolus spp., Phoenix canariensis, Phormium cookianum, Photinia spp., Picea glauca, Pinus spp., Pisum sativum, Podocarpus totara, Pogonarthria fleckii, Pogonarthria squarrosa, Petroselinum crispum, Phalaris arundinacea, Phaseolus spp., Phleum pratense, Phoenix spp., Phragmites australis, Physalis spp., Pinus spp., Pistacia vera, Pisum spp., Poa spp., Populus spp., Prosopis spp., Prosopis cineraria, Prunus spp., Psidium spp., Punica granatum, Pyrus communis, Pseudotsuga menziesii, Pterolobium stellatum, Pyrus communis, Quercus spp., Rhaphiolepsis umbellata, Rhopalostylis sapida, Rhus natalensis, Ribes grossularia, Ribes spp., Robinia pseudoacacia, Rosa spp., Raphanus sativus, Rheum rhabarbarum, Ricinus communis, Rubus spp., Salix spp., Schyzachyrium sanguineum, Sciadopitys verticillata, Sequoia sempervirens, Sequoiadendron giganteum, Saccharum spp., Sambucus spp., Secale cereale, Sesamum spp., Sinapis sp., Solanum spp. (e.g. Solanum tuberosum, Solanum integrifolium or Solanum lycopersicum), Sorghum bicolor, Spinacia spp., Sporobolus fimbriatus, Stiburus alopecuroides, Stylosanthos humilis, Syzygium spp., Tadehagi spp, Taxodium distichum, Themeda triandra, Trifolium spp., Triticum spp. (e.g. Triticum aestivum, Triticum durum, Triticum turgidum, Triticum hybemum, Triticum macha, Triticum sativum or Triticum vulgare), Tagetes spp., Tamarindus indica, Theobroma cacao, Triticosecale rimpaui, Tsuga heterophylla, Tropaeolum minus, Tropaeolum majus, Vaccinium spp., Vicia spp., Vitis vinifera, Vigna spp., Viola odorata, Vitis spp., Watsonia pyramidata, Zantedeschia aethiopica, Zea mays, Zizania palustris, Ziziphus spp., amaranth, artichoke, asparagus, broccoli, Brussels sprouts, cabbage, canola, carrot, cauliflower, celery, collard greens, flax, kale, lentil, oilseed rape, okra, onion, potato, rice, soybean, strawberry, sugar beet, sugarcane, sunflower, tomato, squash, tea and algae, amongst others.

### Alignment of Sequences

[0095] Methods for the alignment of sequences for comparison are well known in the art, such methods include GAP, BESTFIT, BLAST, FASTA and TFASTA. GAP uses the algorithm of Needleman and Wunsch ((1970) J Mol Biol 48: 443-453) to find the global (over the whole the sequence) alignment of two sequences that maximizes the number of matches and minimizes the number of gaps. The BLAST algorithm (Altschul et al. (1990) J Mol Biol 215: 403-10) calculates percent sequence identity and performs a statistical analysis of the similarity between the two sequences. The software for performing BLAST analysis is publicly available through the National Centre for Biotechnology Information (NCBI). Homologues may readily be identified using, for example, the ClustalW multiple sequence alignment algorithm (version 1.83), with the default pairwise alignment parameters, and a scoring method in percentage. Global percentages of similarity and identity may also be determined using one of the methods available in the MatGAT software package (Campanella et al., BMC Bioinformatics. 2003 Jul. 10; 4:29. MatGAT: an application that generates similarity/identity matrices using protein or DNA sequences). Minor manual editing may be performed to optimise alignment between conserved motifs, as would be apparent to a person skilled in the art. Furthermore, instead of using full-length sequences for the identification of homologues, specific domains may also be used. The sequence identity values, which are indicated below in Example 3 as a percentage were determined over the entire nucleic acid or amino acid sequence, and/or over selected domains or conserved motif(s), using the programs mentioned above using the default parameters.

### Reciprocal Blast Search

[0096] Reciprocal blast search typically involves a first BLAST involving BLASTing a query sequence (for example using any of the sequences listed in Table 1, Table 2, Table 14 of Example 9 or Table 18 of Example 18) against any sequence database, such as the publicly available NCBI database. BLASTN or TBLASTX (using standard default values) are generally used when starting from a nucleotide sequence, and BLASTP or TBLASTN (using standard default values) when starting from a protein sequence. The BLAST results may optionally be filtered. The full-length sequences of either the filtered results or non-filtered results are then BLASTed back (second BLAST) against sequences from the organism from which the query sequence is derived (where the query sequence is any of SEQ ID NO: 1 or SEQ ID NO: 2, or SEQ ID NO: 50 to SEQ ID NO: 59, or SEQ ID NO: 131 or SEQ ID NO: 132 or SEQ ID NO: 257 or SEQ ID NO: 258, the second BLAST would therefore be against Oryza sativa sequences). The results of the first and second BLASTs are then compared. A paralogue is identified if a high-ranking hit from the first blast is from the same species as from which the query sequence is derived, a BLAST back then ideally results in the query sequence as highest hit; an orthologue is identified if a high-ranking hit in the first BLAST is not from the same species as from which the query sequence is derived, and preferably results upon BLAST back in the query sequence being among the highest hits.

[0097] High-ranking hits are those having a low E-value. The lower the E-value, the more significant the score (or in other words the lower the chance that the hit was found by chance). Computation of the E-value is well known in the art. In addition to E-values, comparisons are also scored by percentage identity. Percentage identity refers to the number of identical nucleotides (or amino acids) between the two compared nucleic acid (or polypeptide) sequences over a particular length. In the case of large families, ClustalW may be used, followed by a neighbour joining tree, to help visualize clustering of related genes and to identify orthologues and paralogues.

### Amplification

[0098] A variety of nucleic acid amplification-based methods for genetic and physical mapping may be carried out using the nucleic acids. Examples include allele-specific amplification (Kazazian (1989) J. Lab. Clin. Med 11:95-96), polymorphism of PCR-amplified fragments (CAPS; Sheffield et al. (1993) Genomics 16:325-332), allele-specific ligation (Landegren et al. (1988) Science 241:1077-1080), nucleotide extension reactions (Sokolov (1990) Nucleic Acid Res. 18:3671), Radiation Hybrid Mapping (Walter et al. (1997) Nat. Genet. 7:22-28) and Happy Mapping (Dear and Cook (1989) Nucleic Acid Res. 17:6795-6807). For these methods, the sequence of a nucleic acid is used to design and produce primer pairs for use in the amplification reaction or in primer extension reactions. The design of such primers is well known to those skilled in the art. In methods employing PCR-based genetic mapping, it may be necessary to identify DNA sequence differences between the parents of the mapping cross in the region corresponding to the instant nucleic acid sequence. This, however, is generally not necessary for mapping methods.

### DETAILED DESCRIPTION OF THE INVENTION

[0099] The present invention provides a method for enhancing yield-related traits in plants relative to control plants, comprising modulating expression in a plant of a nucleic acid encoding a NAC transcription factor. A preferred method for modulating (preferably, increasing) expression of a nucleic acid encoding a NAC transcription factor is by introducing and expressing in a plant a nucleic acid encoding a particular class of NAC transcription factor as further defined below.

[0100] In addition, the present invention provides a method for enhancing yield-related traits in plants relative to control plants, comprising modulating expression in a plant of a nucleic acid encoding an AP2-2 polypeptide. The present invention further provides a method for enhancing yield-related traits in plants relative to control plants, comprising modulating expression in a plant of a nucleic acid encoding an AP2-70-like polypeptide.

[0101] With regard to a NAC transcription factor, the nucleic acid to be introduced into a plant (and therefore useful in performing the methods of the invention) is any nucleic acid encoding the type of NAC transcription factor which will now be described. A “NAC transcription factor” as defined herein refers to any amino acid sequence which when used in the construction of a NAC phylogenetic tree, such as the one depicted in FIG. 1, tends to cluster with the group of NACs comprising an amino acid sequence represented by any one of SEQ ID NO: 2, SEQ ID NO: 51, SEQ ID NO: 53, SEQ ID NO: 55, SEQ ID NO: 57 or SEQ ID NO: 59, rather than with any other NAC group.

[0102] A person skilled in the art could readily determine whether any amino acid sequence in question falls within the definition of a “NAC transcription factor” using known techniques and software for the making of such a phylogenetic tree, such as a GCG, EBI or CLUSTAL package, using default parameters. The phylogenetic tree of FIG. 1 is taken from Ooka et al., 2003 (DNA Research 10, 239-247, 2003). The method for constructing such a phylogenetic tree is described in Ooka et al., 2003. In the phylogenetic tree of FIG. 1, SEQ ID NO: 2 is found in the group third up from the bottom, labelled “OsNAC7” and SEQ ID NO: 51, SEQ ID NO: 53, SEQ ID NO: 55, SEQ ID NO: 57 and SEQ ID NO: 59 are found in the area starting from (and including) the group labelled on the right hand side of the page as “ONAC022” and ending with (and including) the group labelled on the right hand side of the page as “OsNAC3”. Any sequence clustering within these areas, which comprises the sequences of SEQ ID NO: 2 on the one hand and SEQ ID NO: 51, SEQ ID NO: 53, SEQ ID NO: 55 SEQ ID NO: 57 and SEQ ID NO: 59 on the other hand, would be considered to fall within the aforementioned definition of a NAC transcription factor, and would be considered suitable for use in the methods of the invention. Additionally or alternatively, a “NAC transcription factor” as defined herein is one comprising any one or more of the Motifs described below.

Motif I: KIDLDIIQELD, or a motif having in increasing order of preference at least 50%, 60%, 70%, 80% or 90% sequence identity to the sequence of Motif 1.

[0103] Motif I is preferably K/P/RIG I/S/M D/A/E/Q U/I/V D I/V/F I Q/V/R/K E/D U/I/V D.

Motif II: CKYGXGHGGDEQTEW, or a motif having in increasing order of preference at least 50%, 60%, 70%, 80% or 90% sequence identity to the sequence of Motif 11, where ‘X’ is taken to be any amino acid or a gap.

[0104] Motif II is preferably C K/R Y/L/I G XXX G/Y/N D/E E Q/R T/N/S EW, where ‘X’ is any amino acid or a gap.

Motif III: GWVVCRAFQKP, or a motif having in increasing order of preference at least 50%, 60%, 70%, 80% or 90% sequence identity to the sequence of Motif III.

[0105] Motif III is preferably GWVVCR A/V F X¹ K X², where ‘X¹’ and ‘X²’ may be any amino acid, preferably X¹ is Q/R/K, preferably X² is P/R/K.

[0106] Motifs I to III are found in the NACs represented by SEQ ID NO: 2, and are also typically found in NACs clustering (in a phylogenetic tree of NACs) with the group of NACs comprising SEQ ID NO: 2-rather than with any other NAC group.

Motif IV: PVPIIA, or a motif having in increasing order of preference at least 50%, 60%, 70%, 80% or 90% sequence identity to the sequence of Motif IV.

[0107] Motif IV is preferably A/P/S/N V/L/I/A P/S/D/V/Q V/I I A/T/G.

Motif V: NGSRPN, or a motif having in increasing order of preference at least 50%, 60%, 70%, 80% or 90% sequence identity to the sequence of Motif V.

[0108] Motif V is preferably N G/S S/Q/A/V RP N/S.

Motif VI: CRLYNKK, or a motif having in increasing order of preference at least 50%, 60%, 70%, 80% or 90% sequence identity to the sequence of Motif VI.

[0109] Motif VI is preferably C/Y R/K L/I Y/H/F N/K K K/N/C/S/T

[0110] Motifs III to VI are typically found in NACs of SEQ ID NO: 51, SEQ ID NO: 53, SEQ ID NO: 55 SEQ ID NO: 57 and SEQ ID NO: 59 and in NACs clustering (in a phylogenetic tree) with the NACs represented by the aforementioned SEQ ID NOs rather than with any other NAC group.

Motif VII: NEWEKMQ, or a motif having in increasing order of preference at least 50%, 60%, 70%, 80% or 90% sequence identity to the sequence of Motif VII.

[0111] Motif VII is preferably N E/Q/T WEK M/V Q/R/K

Motif VIII: WGETRTPESE, or a motif having in increasing order of preference at least 50%, 60%, 70%, 80% or 90% sequence identity to the sequence Motif VIII.

[0112] Motif VIII is preferably WGE T/A RTPES E/D

Motif IX: VPKKESMDDA, or a motif having in increasing order of preference at least 50%, 60%, 70%, 80% or 90% sequence identity to the sequence of Motif IX.

[0113] Motif IX is preferably V/L PK K/E E S/R/A/V M/V/A/Q/R D/E D/E/L A/G/D

Motif X: SYDDIQGMYS, or a motif having in increasing order of preference at least 50%, 60%, 70%, 80% or 90% sequence identity to the sequence of Motif X.

[0114] Motif X is preferably S L/Y DD L/I Q G/S L/M/P G/Y S/N.

[0115] Motifs VII, VIII, IX and X are typically found in NACs of SEQ ID NO: 51 and in NACs clustering (in a phylogenetic tree) with the NAC of SEQ ID NO: 51 rather than with any other NAC group.

Motif XI: DSMPRLHADSSCSE, or a motif having in increasing order of preference at least 50%, 60%, 70%, 80% or 90% sequence identity to the sequence of Motif XI.

[0116] Motif XI is preferably DS M/V/I P R/K L/I/A H T/A/S D/E SS C/G SE.

[0117] Motif XI is typically found in NACs of SEQ ID NO: 53 and SEQ ID NO: 55 and in NACs clustering (in a phylogenetic tree) with the NACs represented by the aforementioned SEQ ID NOs rather than with any other NAC group.

[0118] Each of motifs I to XI may comprise one or more conservative amino acid substitution at any position. Examples of NAC transcription factors as defined herein, i.e. any amino acid sequence which when used in the construction of a NAC phylogenetic tree, such as the one depicted in FIG. 1, tends to cluster with the group of NACs represented by any one of SEQ ID NO: 2, SEQ ID NO: 51, SEQ ID NO: 53, SEQ ID NO: 55 SEQ ID NO: 57 and SEQ ID NO: 59 rather than with any other NAC group, are as given in Tables 3 and 4 below.

TABLE 3
Examples of NAC transcription factors that cluster (in a phylogenetic tree) with the NAC
represented by SEQ ID NO: 2 rather than with any other NAC group

| | | NCBI Accession | | |
|---|---|---|---|---|
| Nucleic Acid | Amino Acid | Number | Other name (if any) | Source |
| SEQ ID NO: 1 | SEQ ID NO: 2 | XM_479673.1 | NAM2 (also called | Oryza sativa |
| | | | CDS4054 in the | |
| | | | alignment of FIG. 2) | |
| SEQ ID NO: 3 | SEQ ID NO: 4 | AK106313 | | Oryza sativa |
| SEQ ID NO: 5 | SEQ ID NO: 6 | NM_187584.1 | | Oryza sativa |
| SEQ ID NO: 7 | SEQ ID NO: 8 | XM_467007.1 | | Oryza sativa |
| SEQ ID NO: 9 | SEQ ID NO: 10 | XM_473322.1 | | Oryza sativa |
| SEQ ID NO: 11 | SEQ ID NO: 12 | ABE89364 | | Medicago |
| | | | | truncatula |
| SEQ ID NO: 13 | SEQ ID NO: 14 | NM_101098.2 | ANAC007/EMB2749 | Arabidopsis |
| | | | | thaliana |
| SEQ ID NO: 15 | SEQ ID NO: 16 | NM_104947.1 | ANAC026 | Arabidopsis |
| | | | | thaliana |
| SEQ ID NO: 17 | SEQ ID NO: 18 | XM_476289.1 | | Oryza sativa |
| SEQ ID NO: 19 | SEQ ID NO: 20 | NM_127362.1 | ANAC037 | Arabidopsis |
| | | | | thaliana |
| SEQ ID NO: 21 | SEQ ID NO: 22 | NM_119783.2 | ANAC076 | Arabidopsis |
| | | | | thaliana |
| SEQ ID NO: 23 | SEQ ID NO: 24 | NM_187584.1 | | Oryza sativa |
| SEQ ID NO: 25 | SEQ ID NO: 26 | NM_125632.1 | ANAC101 | Arabidopsis |
| | | | | thaliana |
| SEQ ID NO: 27 | SEQ ID NO: 28 | NM_126028.1 | ANAC105 | Arabidopsis |
| | | | | thaliana |
| SEQ ID NO: 29 | SEQ ID NO: 30 | AK071064.1 | | Oryza sativa |
| SEQ ID NO: 31 | SEQ ID NO: 32 | NM_105851.1 | ANAC030 | Arabidopsis |
| | | | | thaliana |
| SEQ ID NO: 33 | SEQ ID NO: 34 | NM_197511.1 | | Oryza sativa |
| SEQ ID NO: 35 | SEQ ID NO: 36 | AB217775.1 | | Zinnia elegans |
| SEQ ID NO: 37 | SEQ ID NO: 38 | AJ833965.1 | | Zea mays |

TABLE 4
Examples of NAC transcription factors that cluster (in a phylogenetic tree) with the NAC
represented by any one of SEQ ID NO: 51, SEQ ID NO: 53, SEQ ID NO: 55
SEQ ID NO: 57 and SEQ ID NO: 59 rather than with any other NAC group

| SEQ ID NO: 50 | SEQ ID NO: 51 | XM_470088.1 | NAC1 | Oryza sativa |
|---|---|---|---|---|
| | | | (also known as | |
| | | | CDS4035 in the | |
| | | | alignment of FIG. 2) | |
| SEQ ID NO: 52 | SEQ ID NO: 53 | AB028185.1 | NAC4 | Oryza sativa |
| | | BAA89800.1 | (known as OsNAC6 | |
| | | | in alignment of FIG. 2) | |
| SEQ ID NO: 54 | SEQ ID NO: 55 | AB028184.1 | NAC6 | Oryza sativa |
| | | BAA89799.1 | (known as OsNAC5 | |
| | | | in alignment of FIG. 2) | |
| SEQ ID NO: 56 | SEQ ID NO: 57 | AK107330.1 | NAC7 | Oryza sativa |
| | | | (known as ONAC24 | |
| | | | in alignment of FIG. 2) | |
| SEQ ID NO: 58 | SEQ ID NO: 59 | AK069257.1 | NAC3 | Oryza sativa |
| | | | (known as CDS4034 | |
| | | | in alignment of FIG. 2) | |
| SEQ ID NO: 60 | SEQ ID NO: 61 | AY625683.1 | NAC2-like | Triticum aestivum |
| | | AAU08786.1 | TaNAC2 | |
| SEQ ID NO: 62 | SEQ ID NO: 63 | AY103772.1 | PCO133091 | Zea mays |
| SEQ ID NO: 64 | SEQ ID NO: 65 | AJ010829.1 | GRAB1 | Triticum aestivum |
| | | CAA09371.1 | TACAA09371.1 | |
| SEQ ID NO: 66 | SEQ ID NO: 67 | NM_186659.2 | NAC3-like | Oryza sativa |
| | | NP_911548.1 | RiceNP_911548.1 | |
| SEQ ID NO: 68 | SEQ ID NO: 69 | DQ267442.1 | NAC1-like | Elaeis guineensis |
| | | ABB72844.1 | elaeis | |
| SEQ ID NO: 70 | SEQ ID NO: 71 | AB028183.1 | NAC4-like | Oryza sativa |
| | | BAA89798.1 | OsNAC4 | |
| SEQ ID NO: 72 | SEQ ID NO: 73 | DQ028770.1 | NAC2-like | Glycine max |
| | | AAY46122.1 | GmNAC2AAY46122.1 | |
| SEQ ID NO: 74 | SEQ ID NO: 75 | AY498713.1 | NAC-like | Lycopersicon |
| | | AAR88435.1 | tomatoNAC | esculentum |
| SEQ ID NO: 76 | SEQ ID NO: 77 | AY245883.1 | NAC5-8 | Brassica napus |
| | | AAP35052.1 | BrassicaNAC5- | |
| | | | 8”NAC-domain | |
| SEQ ID NO: 78 | SEQ ID NO: 79 | XM_475238.1 | NAC48 | Oryza sativa |
| | | XP_475238.1 | AK068392”putative | |
| SEQ ID NO: 80 | SEQ ID NO: 81 | AJ401151.1 | NAC | Solanum |
| | | CAC42087.1 | solanum”putative | tuberosum |
| SEQ ID NO: 82 | SEQ ID NO: 83 | NM_147856.2 | ATAF2 | Arabidopsis |
| | | NP_680161.1 | AT5G08790” = ”ATAF | thaliana |
| | | | 2”NP_680161.1” | |
| SEQ ID NO: 84 | SEQ ID NO: 85 | AF509873.1 | NH10 | Petunia × hybrida |
| | | AAM34773.1 | PetuniaNH10 = ”nam- | |
| | | | like | |
| SEQ ID NO: 86 | SEQ ID NO: 87 | AB218789 | NAC | Prunus mume |
| | | BAE48667.1 | PrunusPm74”NAC | |
| SEQ ID NO: 88 | SEQ ID NO: 89 | AY245885.1 | NAC18 | Brassica napus |
| | | AAP35054.1 | BnNAC18”NAC- | |
| | | | domain | |
| SEQ ID NO: 90 | SEQ ID NO: 91 | NM_125774.3 | ANAC102 | Arabidopsis |
| | | NP_201184.2 | | thaliana |
| SEQ ID NO: 92 | SEQ ID NO: 93 | AY714222.1 | NAC | Capsicum annuum |
| | | AAW48094.1 | CaNAC1 | |
| SEQ ID NO: 94 | SEQ ID NO: 95 | NM_100054.2 | ATAF1 | Arabidopsis |
| | | NP_171677 | | thaliana |
| SEQ ID NO: 96 | SEQ ID NO: 97 | AY573802.1 | NAC-NOR | Lycopersicon |
| | | AAU43922.1 | LeNAC- | esculentum |
| | | | NOR”transcription | |
| SEQ ID NO: 98 | SEQ ID NO: 99 | NM_118875.2 | RD26 | Arabidopsis |
| | | NP_567773.1 | Arabidopsis | thaliana |
| SEQ ID NO: | SEQ ID NO: | DQ022843.1 | NAC69-3 | Triticum aestivum |
| 100 | 101 | AAY44098.1 | NAC69-3”TaNAC69- | |
| | | | 3””NAC | |
| SEQ ID NO: | SEQ ID NO: | A625682.1 | NAC69-1 | Triticum aestivum |
| 102 | 103 | AAU08785.1 | NAC69- | |
| | | | 1”TaNAC69””NAC | |
| SEQ ID NO: | SEQ ID NO: | AY742218.1 | NAC23 | Saccharaum |
| 104 | 105 | AAW62955.1 | Saccharum | officinarum |
| SEQ ID NO: | SEQ ID NO: | AK063406.1 | NAC10 | Oryza sativa |
| 106 | 107 | | ONAC10AK063406 | |
| SEQ ID NO: | SEQ ID NO: | AC145753.1 | NAM | Medicago |
| 108 | 109 | | medicagoNAClike | truncatula |

[0119] The invention is illustrated by transforming plants with the Oryza sativa sequence represented by SEQ ID NO: 1, encoding the polypeptide sequence of SEQ ID NO: 2, and with the Oryza sativa sequence represented by SEQ ID NO: 50, encoding the polypeptide sequence of SEQ ID NO: 51, and with the Oryza sativa sequence represented by SEQ ID NO: 52, encoding the polypeptide sequence of SEQ ID NO: 53, and with the Oryza sativa sequence represented by SEQ ID NO: 54, encoding the polypeptide of SEQ ID NO: 55, and with the Oryza sativa sequence represented by SEQ ID NO: 56, encoding the polypeptide of SEQ ID NO: 57, and with the Oryza sativa sequence represented by SEQ ID NO: 58, encoding the polypeptide of SEQ ID NO: 59, however performance of the invention is not restricted to these sequences. The methods of the invention may be performed using any nucleic acid encoding a NAC transcription factor as defined herein, such as any of the nucleic acid sequences given in Tables 3 and 4.

[0120] The NAC amino acid sequences given in Table 3 may be considered to be orthologues and paralogues of the NAC represented by SEQ ID NO: 2. The NAC amino acid sequences given in Table 4 may be considered to be orthologues and paralogues of the NAC represented by any one of SEQ ID NO: 51, SEQ ID NO: 53, SEQ ID NO: 55 SEQ ID NO: 57 and SEQ ID NO: 59.

[0121] Orthologues and paralogues may easily be found by performing a so-called reciprocal blast search as described in the “definitions” section herein. Where the query sequence is any of SEQ ID NO: 1 or SEQ ID NO: 2, or SEQ ID NO: 50 to SEQ ID NO: 59, the second BLAST would therefore be against Oryza sequences.

[0122] Table 3 gives examples of orthologues and paralogues of the NAC represented by SEQ ID NO 2. Table 4 gives examples of orthologues and paralogues of the NAC represented by SEQ ID NO: 51, SEQ ID NO: 53, SEQ ID NO: 55 SEQ ID NO: 57 and SEQ ID NO: 59. Further orthologues and paralogues may readily be identified using the BLAST procedure described above and by following the procedure given in the Examples section.

[0123] The NAC proteins are identifiable by the presence of a highly conserved N-terminal NAC domain (shown in FIG. 5), accompanied by diverse C-terminal domains.

[0124] Specialist databases also exist for the identification of domains. The NAC domain in a NAC transcription factor may be identified as explained in the “definitions” section.

[0125] NAC domains may also be identified using routine techniques, such as by sequence alignment as explained in the “definitions” section herein.

[0126] The invention also provides hitherto unknown NAC-encoding nucleic acids and NAC polypeptides.

[0127] According to a further embodiment of the present invention, there is therefore provided an isolated nucleic acid molecule comprising:

(i) a nucleic acid represented by one of SEQ ID NO: 347, SEQ ID NO: 349, SEQ ID NO: 351, SEQ ID NO: 353, SEQ ID NO: 355, SEQ ID NO: 357, SEQ ID NO: 359, SEQ ID NO: 361, or SEQ ID NO: 363;
(ii) the complement of a nucleic acid represented by one of SEQ ID NO: 347, SEQ ID NO: 349,

[0128] SEQ ID NO: 351, SEQ ID NO: 353, SEQ ID NO: 355, SEQ ID NO: 357, SEQ ID NO: 359, SEQ ID NO: 361, or SEQ ID NO: 363;

(iii) a nucleic acid encoding a NAC polypeptide having, in increasing order of preference, at least 50%, 55%, 60%, 65%, 70%, 75%, 80%, 85%, 90%, 95%, 96%, 97%, 98%, 99% or more sequence identity to the amino acid sequence represented by one of SEQ ID NO: 348, SEQ ID NO: 350, SEQ ID NO: 352, SEQ ID NO: 354, SEQ ID NO: 356, SEQ ID NO: 358, SEQ ID NO: 360, SEQ ID NO: 362, or SEQ ID NO: 364.

[0129] According to a further embodiment of the present invention, there is also provided an isolated polypeptide comprising:

(i) an amino acid sequence represented by one of SEQ ID NO: SEQ ID NO: 348, SEQ ID NO: 350,

[0130] SEQ ID NO: 352, SEQ ID NO: 354, SEQ ID NO: 356, SEQ ID NO: 358, SEQ ID NO: 360, SEQ ID NO: 362, or SEQ ID NO: 364;

(ii) an amino acid sequence having, in increasing order of preference, at least 50%, 55%, 60%, 65%, 70%, 75%, 80%, 85%, 90%, 95%, 96%, 97%, 98%, 99% or more sequence identity to the amino acid sequence represented by one of SEQ ID NO: 348, SEQ ID NO: 350, SEQ ID NO: 352, SEQ ID NO: 354, SEQ ID NO: 356, SEQ ID NO: 358, SEQ ID NO: 360, SEQ ID NO: 362, or SEQ ID NO: 364;
(iii) derivatives of any of the amino acid sequences given in (i) or (ii) above.

[0131] Nucleic acids encoding NAC transcription factors defined herein need not be full-length nucleic acids, since performance of the methods of the invention does not rely on the use of full length nucleic acid sequences. Examples of nucleic acids suitable for use in performing the methods of the invention include the nucleic acid sequences given in Tables 3 and 4, but are not limited to those sequences. Nucleic acid variants may also be useful in practicing the methods of the invention. Examples of such nucleic acid variants include portions of nucleic acids encoding a NAC transcription factor as defined herein, splice variants of nucleic acids encoding a NAC transcription factor as defined herein, allelic variants of nucleic acids encoding a NAC transcription factor as defined herein and variants of nucleic acids encoding a NAC transcription factor as defined herein that are obtained by gene shuffling. The terms portion, splice variant, allelic variant and gene shuffling will now be described.

[0132] According to the present invention, there is provided a method for enhancing yield-related traits in plants, comprising introducing and expressing in a plant a portion of any one of the nucleic acid sequences given in Tables 3 and 4, or a portion of a nucleic acid encoding an orthologue, paralogue or homologue of any of the amino acid sequences given in Tables 3 and 4.

[0133] Portions useful in the methods of the invention, encode a polypeptide falling within the definition of a NAC transcription factor as defined herein and having substantially the same biological activity as the NAC transcription factor represented by any of the amino acid sequences given in Tables 3 and 4. The portion is typically at least 600 consecutive nucleotides in length, preferably at least 700 consecutive nucleotides in length, more preferably at least 800 consecutive nucleotides in length and most preferably at least 900 consecutive nucleotides in length, the consecutive nucleotides being of any one of the nucleic acid sequences given in Tables 3 and 4. Preferably, the portion is a portion of any one of the nucleic acids given in Tables 3 and 4. Most preferably the portion is a portion of the nucleic acid of SEQ ID NO: 1, SEQ ID NO: 50, SEQ ID NO: 52, SEQ ID NO: 54, SEQ ID NO: 56 or SEQ ID NO: 58. Preferably, the portion encodes an amino acid sequence comprising any one or more of Motifs I to XI as defined herein.

[0134] A portion of a nucleic acid encoding a NAC transcription factor as defined herein may be prepared, for example, by making one or more deletions to the nucleic acid in question. The portions may be used in isolated form or they may be fused to other coding (or non coding) sequences in order to, for example, produce a protein that combines several activities. When fused to other coding sequences, the resultant polypeptide produced upon translation may be bigger than that predicted for the NAC transcription factor portion.

[0135] Another nucleic acid variant useful in the methods of the invention is a nucleic acid capable of hybridising, under reduced stringency conditions, preferably under stringent conditions, with a nucleic acid encoding a NAC transcription factor as defined herein, or with a portion as defined herein.

[0136] Hybridising sequences useful in the methods of the invention, encode a polypeptide having a NAC domain (as described above) and having substantially the same biological activity as the NAC transcription factor represented by any of the amino acid sequences given in Tables 3 and 4. The hybridising sequence is typically at least 600 consecutive nucleotides in length, preferably at least 700 consecutive nucleotides in length, more preferably at least 800 consecutive nucleotides in length and most preferably at least 900 consecutive nucleotides in length. Preferably, the hybridising sequence is one that is capable of hybridising to any of the nucleic acids given in Table 3 and 4, or to a portion of any of these sequences, a portion being as defined above. Most preferably, the hybridising sequence is capable of hybridising to a nucleic acid as represented by SEQ ID NO: 1, SEQ ID NO: 50, SEQ ID NO: 52, SEQ ID NO: 54, SEQ ID NO: 56 or SEQ ID NO: 58 capable of hybridising to a portion of any of the aforementioned sequences. Preferably, the sequence capable of hybridizing encodes a polypeptide comprising any one or more of Motifs I to XI as defined herein.

[0137] According to the present invention, there is provided a method for enhancing yield-related traits in plants, comprising introducing and expressing in a plant a nucleic acid capable of hybridizing to any one of the nucleic acids given in Tables 3 and 4, or comprising introducing and expressing in a plant a nucleic acid capable of hybridising to a nucleic acid encoding an orthologue, paralogue or homologue of any of the nucleic acid sequences given in Tables 3 and 4.

[0138] Another nucleic acid variant useful in the methods of the invention is a splice variant encoding a NAC transcription factor as defined hereinabove.

[0139] According to the present invention, there is provided a method for enhancing yield-related traits in plants, comprising introducing and expressing in a plant a splice variant of any one of the nucleic acid sequences given in Tables 3 and 4, or a splice variant of a nucleic acid encoding an orthologue, paralogue or homologue of any of the amino acid sequences given in Tables 3 and 4.

[0140] Preferred splice variants are splice variants of a nucleic acid represented by any of SEQ ID NO: 1, SEQ ID NO: 50, SEQ ID NO: 52, SEQ ID NO: 54, SEQ ID NO: 56 or SEQ ID NO: 58, or splice variants encoding orthologues or paralogues of any of the amino acid sequences given in Tables 3 and 4. Preferably, the splice variants encode a polypeptide comprising any one or more of Motifs I to XI as defined herein.

[0141] Another nucleic acid variant useful in performing the methods of the invention is an allelic variant of a nucleic acid encoding a NAC transcription factor as defined hereinabove.

[0142] According to the present invention, there is provided a method for enhancing yield-related traits in plants, comprising introducing and expressing in a plant an allelic variant of any one of the nucleic acids given in Tables 3 and 4, or comprising introducing and expressing in a plant an allelic variant of a nucleic acid encoding an orthologue, paralogue or homologue of any of the amino acid sequences given in Tables 3 and 4.

[0143] Preferably, the allelic variant is an allelic variant of SEQ ID NO: 1, SEQ ID NO: 50, SEQ ID NO: 52, SEQ ID NO: 54, SEQ ID NO: 56 or SEQ ID NO: 58, or an allelic variant of a nucleic acid encoding an orthologue or paralogue of any of the aforementioned SEQ ID NOs. Preferably, the allelic variant encodes a polypeptide comprising any one or more of Motifs I to XI as defined herein.

[0144] A further nucleic acid variant useful in the methods of the invention is a nucleic acid variant obtained by gene shuffling. Gene shuffling or directed evolution may also be used to generate variants of nucleic acids encoding NAC transcription factors as defined above.

[0145] According to the present invention, there is provided a method for enhancing yield-related traits in plants, comprising introducing and expressing in a plant a variant of any one of the nucleic acid sequences given in Tables 3 and 4, or comprising introducing and expressing in a plant a variant of a nucleic acid encoding an orthologue, paralogue or homologue of any of the amino acid sequences given in Tables 3 and 4, which variant nucleic acid is obtained by gene shuffling. Preferably, the variants obtained by gene shuffling encode a polypeptide comprising any one or more of Motifs I to XI as defined herein.

[0146] Furthermore, nucleic acid variants may also be obtained by site-directed mutagenesis. Several methods are available to achieve site-directed mutagenesis, the most common being PCR based methods (current protocols in molecular biology. Wiley Eds).

[0147] Also useful in the methods of the invention are nucleic acids encoding homologues of any one of the amino acid sequences given in Tables 3 and 4.

[0148] Also useful in the methods of the invention are nucleic acids encoding derivatives of any one of the amino acids given in Table 3 or orthologues or paralogues of any of the aforementioned SEQ ID NOs. Preferred derivatives are derivatives of the proteins represented by SEQ ID NO: 2, SEQ ID NO: 51, SEQ ID NO: 53, SEQ ID NO: 55, SEQ ID NO: 57 or SEQ ID NO: 59.

[0149] Furthermore, NAC transcription factors (at least in their native form) typically have DNA-binding activity and an activation domain. A person skilled in the art may easily determine the presence of an activation domain and DNA-binding activity using routine tools and techniques.

[0150] Nucleic acids encoding NAC transcription factors may be derived from any natural or artificial source. The nucleic acid may be modified from its native form in composition and/or genomic environment through deliberate human manipulation. Preferably the NAC transcription factor-encoding nucleic acid is from a plant, further preferably from a monocot, more preferably from the Poaceae family, most preferably the nucleic acid is from Oryza sativa.

[0151] Any reference herein to a NAC transcription factor is therefore taken to mean a NAC transcription factor as defined above. Any nucleic acid encoding such a NAC transcription factor is suitable for use in performing the methods of the invention.

[0152] The present invention also encompasses plants or parts thereof (including seeds) obtainable by the methods according to the present invention. The plants or parts thereof comprise a nucleic acid transgene encoding a NAC transcription factor as defined above.

[0153] The invention also provides genetic constructs and vectors to facilitate introduction and/or expression of the nucleic acid sequences useful in the methods according to the invention, in a plant.

[0154] Therefore, there is provided a gene construct comprising:
[0155] i. Any nucleic acid encoding a NAC transcription factor as defined hereinabove;
[0156] ii. One or more control sequences operably linked to the nucleic acid of (i).

[0157] Constructs useful in the methods according to the present invention may be constructed using recombinant DNA technology well known to persons skilled in the art. The gene constructs may be inserted into vectors, which may be commercially available, suitable for transforming into plants and suitable for expression of the gene of interest in the transformed cells. The invention therefore provides use of a gene construct as defined hereinabove in the methods of the invention.

[0158] Plants are transformed with a vector comprising the sequence of interest (i.e., a nucleic acid encoding a NAC transcription factor). The skilled artisan is well aware of the genetic elements that must be present in the vector in order to successfully transform, select and propagate host cells containing the sequence of interest. The sequence of interest is operably linked to one or more control sequences (at least to a promoter).

[0159] According to one preferred feature of the invention, the nucleic acid encoding a NAC transcription factor is operably linked to a constitutive promoter. A constitutive promoter is transcriptionally active during most but not necessarily all phases of its growth and development and is substantially ubiquitously expressed. The constitutive promoter is preferably a GOS2 promoter, more preferably the constitutive promoter is a rice GOS2 promoter, further preferably the constitutive promoter is represented by a nucleic acid sequence substantially similar to SEQ ID NO: 39 or SEQ ID NO: 339, most preferably the constitutive promoter is as represented by SEQ ID NO: 39 or SEQ ID NO: 339.

[0160] It should be clear that the applicability of the present invention is not restricted to the NAC transcription factor-encoding nucleic acid represented by SEQ ID NO: 1, SEQ ID NO: 50, SEQ ID NO: 52, SEQ ID NO: 54, SEQ ID NO: 56 or SEQ ID NO: 58, nor is the applicability of the invention restricted to expression of a such a NAC transcription factor-encoding nucleic acid when driven by a GOS2 promoter. Examples of other constitutive promoters which may also be used to perform the methods of the invention are shown in Table 2a in the “definitions” section herein.

[0161] According to another preferred feature of the invention, the nucleic acid encoding a NAC-type transcription factor is operably linked to a young green tissue-specific promoter. A young green tissue-specific promoter as defined herein is a promoter that is transcriptionally active predominantly in young green tissue, substantially to the exclusion of any other parts of a plant, whilst still allowing for any leaky expression in these other plant parts. The young green tissue-specific promoter is preferably a protochlorophylid reductase promoter, more preferably the protochlorophylid reductase promoter represented by a nucleic acid sequence substantially similar to SEQ ID NO: 40, most preferably the promoter is as represented by SEQ ID NO: 40.

[0162] It should be clear that the applicability of the present invention is not restricted to the NAC transcription factor-encoding nucleic acid represented by SEQ ID NO: 1, nor is the applicability of the invention restricted to expression of a such a NAC transcription factor-encoding nucleic acid when driven by a protochlorophylid reductase promoter.

[0163] Examples of other young green tissue-specific promoters which may also be used to perform the methods of the invention are shown in Table 2c above.

[0164] According to another preferred feature of the invention, the nucleic acid encoding a NAC-type transcription factor is operably linked to a root-specific promoter (internal reference pro0110). A root-specific promoter as defined herein is a promoter that is transcriptionally active predominantly in plant roots, substantially to the exclusion of any other parts of a plant, whilst still allowing for any leaky expression in these other plant parts. The root-specific promoter is preferably an RCc3 promoter (Plant Mol Biol. 1995 January; 27(2):237-48), more preferably the RCc3 promoter is from rice, further preferably the RCc3 promoter is represented by a nucleic acid sequence substantially similar to SEQ ID NO: 110, most preferably the promoter is as represented by SEQ ID NO: 110.

[0165] It should be clear that the applicability of the present invention is not restricted to the NAC transcription factor-encoding nucleic acid represented by SEQ ID NO: 50, SEQ ID NO: 52, SEQ ID NO: 54, SEQ ID NO: 56 or SEQ ID NO: 58, nor is the applicability of the invention restricted to expression of a such a NAC transcription factor-encoding nucleic acid when driven by an RCc3 promoter.

[0166] Examples of other root-specific promoters which may also be used to perform the methods of the invention are shown in Table 2b above.

[0167] Optionally, one or more terminator sequences may be used in the construct introduced into a plant. Additional regulatory elements may include transcriptional as well as translational enhancers. Those skilled in the art will be aware of terminator and enhancer sequences that may be suitable for use in performing the invention. An intron sequence may also be added to the 5′ untranslated region (UTR) or in the coding sequence to increase the amount of the mature message that accumulates in the cytosol, as described in the definitions section. Other control sequences (besides promoter, enhancer, silencer, intron sequences, 3′UTR and/or 5′UTR regions) may be protein and/or RNA stabilizing elements. Such sequences would be known or may readily be obtained by a person skilled in the art.

[0168] The genetic constructs of the invention may further include an origin of replication sequence that is required for maintenance and/or replication in a specific cell type. One example is when a genetic construct is required to be maintained in a bacterial cell as an episomal genetic element (e.g. plasmid or cosmid molecule). Preferred origins of replication include, but are not limited to, the f1-ori and colE1. The genetic construct may optionally comprise a selectable marker gene. Selectable markers are described in more detail in the “definitions” section herein. The marker genes may be removed or excised from the transgenic cell once they are no longer needed. Techniques for marker removal are known in the art, useful techniques are described above in the definitions section.

[0169] The invention also provides a method for the production of transgenic plants having enhanced yield-related traits relative to control plants, comprising introduction and expression in a plant of any nucleic acid encoding a NAC transcription factor as defined hereinabove.

[0170] More specifically, the present invention provides a method for the production of transgenic plants having enhanced yield-related traits, which method comprises:
[0171] i. introducing and expressing a nucleic acid encoding a NAC transcription factor (as defined herein) in a plant cell; and
[0172] ii. cultivating the plant cell under conditions promoting plant growth and development.

[0173] The nucleic acid may be introduced directly into a plant cell or into the plant itself (including introduction into a tissue, organ or any other part of a plant). According to a preferred feature of the present invention, the nucleic acid is preferably introduced into a plant by transformation.

[0174] The genetically modified plant cells can be regenerated via all methods with which the skilled worker is familiar. Suitable methods can be found in the abovementioned publications by S. D. Kung and R. Wu, Potrykus or Höfgen and Willmitzer.

[0175] Generally after transformation, plant cells or cell groupings are selected for the presence of one or more markers which are encoded by plant-expressible genes co-transferred with the gene of interest, following which the transformed material is regenerated into a whole plant. To select transformed plants, the plant material obtained in the transformation is, as a rule, subjected to selective conditions so that transformed plants can be distinguished from untransformed plants. For example, the seeds obtained in the above-described manner can be planted and, after an initial growing period, subjected to a suitable selection by spraying. A further possibility consists in growing the seeds, if appropriate after sterilization, on agar plates using a suitable selection agent so that only the transformed seeds can grow into plants. Alternatively, the transformed plants are screened for the presence of a selectable marker such as the ones described above.

[0176] Following DNA transfer and regeneration, putatively transformed plants may also be evaluated, for instance using Southern analysis, for the presence of the gene of interest, copy number and/or genomic organisation. Alternatively or additionally, expression levels of the newly introduced DNA may be monitored using Northern and/or Western analysis, both techniques being well known to persons having ordinary skill in the art.

[0177] The generated transformed plants may be propagated by a variety of means, such as by clonal propagation or classical breeding techniques. For example, a first generation (or T1) transformed plant may be selfed and homozygous second-generation (or T2) transformants selected, and the T2 plants may then further be propagated through classical breeding techniques. The generated transformed organisms may take a variety of forms. For example, they may be chimeras of transformed cells and non-transformed cells; clonal transformants (e.g., all cells transformed to contain the expression cassette); grafts of transformed and untransformed tissues (e.g., in plants, a transformed rootstock grafted to an untransformed scion).

[0178] The present invention clearly extends to any plant cell or plant produced by any of the methods described herein, and to all plant parts and propagules thereof. The present invention extends further to encompass the progeny of a primary transformed or transfected cell, tissue, organ or whole plant that has been produced by any of the aforementioned methods, the only requirement being that progeny exhibit the same genotypic and/or phenotypic characteristic(s) as those produced by the parent in the methods according to the invention.

[0179] The invention also includes host cells containing an isolated nucleic acid encoding a NAC transcription factor as defined hereinabove. Preferred host cells according to the invention are plant cells.

[0180] The invention also extends to harvestable parts of a plant such as, but not limited to seeds, leaves, fruits, flowers, stems, rhizomes, tubers and bulbs. The invention furthermore relates to products derived, preferably directly derived, from a harvestable part of such a plant, such as dry pellets or powders, oil, fat and fatty acids, starch or proteins.

[0181] According to a preferred feature of the invention, the modulated expression is increased expression. Methods for increasing expression of nucleic acids or genes, or gene products, are well documented in the art. Examples of methods for increasing expression are given in the “definitions” section herein.

[0182] As mentioned above, a preferred method for modulating (preferably, increasing) expression of a nucleic acid encoding a NAC transcription factor is by introducing and expressing in a plant a nucleic acid encoding a NAC transcription factor; however the effects of performing the method, i.e. enhancing yield-related traits may also be achieved using other well known techniques, such as T-DNA activation, TILLING, homologous recombination or directed evolution. A description of some of these techniques is given in the “definitions” section herein.

[0183] According to a preferred feature of the present invention, performance of the methods of the invention gives plants having an increased growth rate relative to control plants, particularly during the early stages of plant development (typically three weeks post germination in the case of rice and maize, but this will vary from species to species) leading to early vigour. Therefore, according to the present invention, there is provided a method for increasing the growth rate of plants, which method comprises modulating expression, preferably increasing expression, in a plant of a nucleic acid encoding a particular type of NAC transcription factor, as defined herein. The present invention also provides a method for obtaining plants having early vigour relative to control plants, which method comprises modulating, preferably increasing, expression in a plant of a nucleic acid encoding a NAC transcription factor as defined herein.

[0184] Early vigour may also result from or be manifested as increased plant fitness relative to control plants due to, for example, the plants being better adapted to their environment (i.e. being more able to cope with various abiotic or biotic stress factors). Plants having early vigour also show better establishment of the crop (with the crop growing in uniform manner, i.e. with the majority of plants reaching the various stages of development at substantially the same time), and show better growth and often better yield. Early vigour may be determined by measuring various factors, such as seedling growth rate, thousand kernel weight, percentage germination, percentage emergence, seedling height, root length and shoot biomass and many more.

[0185] Performance of the methods of the invention gives plants grown under non-stress conditions or under mild drought conditions increased yield relative to control plants grown under comparable conditions. Therefore, according to the present invention, there is provided a method for increasing yield in plants grown under non-stress conditions or under mild drought conditions, which method comprises increasing expression in a plant of a nucleic acid encoding a NAC transcription factor.

[0186] Performance of the methods of the invention gives plants grown under conditions of nutrient deficiency, particularly under conditions of nitrogen deficiency, increased yield relative to control plants grown under comparable conditions. Therefore, according to the present invention, there is provided a method for increasing yield in plants grown under conditions of nutrient deficiency, which method comprises increasing expression in a plant of a nucleic acid encoding a POI polypeptide. Nutrient deficiency may result from a lack of nutrients such as nitrogen, phosphates and other phosphorous-containing compounds, potassium, calcium, cadmium, magnesium, manganese, iron and boron, amongst others.

[0187] In the case of use in the methods of the invention of nucleic acids encoding NAC4 transcription factors (for example, SEQ ID NO: 52) and NAC4 transcription factors themselves (for example SEQ ID NO: 53), an increase in yield and/or seed yield and/or growth rate was found to occur in plants grown under substantially non-stress conditions and under conditions of stress compared to control plants.

[0188] A “NAC4 transcription factor” as defined herein refers to any amino acid sequence which when used in the construction of a NAC phylogenetic tree, such as the one depicted in FIG. 1, tends to cluster with the group of NACs comprising an amino acid sequence represented by SEQ ID NO: 53 rather than with any other NAC group.

[0189] The NAC4 transcription factor may also comprise Motif XI: DSMPRLHADSSCSE, or a motif having in increasing order of preference at least 50%, 60%, 70%, 80% or 90% sequence identity to the sequence of Motif XI.

[0190] Motif XI is preferably DS M/V/I P R/K L/I/A H T/A/S D/E SS C/G SE.

[0191] Motif XI is typically found in NACs of SEQ ID NO: 53 and SEQ ID NO: 55 and in NACs clustering (in a phylogenetic tree) with the NACs represented by the aforementioned SEQ ID NOs rather than with any other NAC group. Motif XI may comprise one or more conservative amino acid substitution at any position.

[0192] Plants typically respond to exposure to stress by growing more slowly. In conditions of severe stress, the plant may even stop growing altogether. Mild stress on the other hand is defined herein as being any stress to which a plant is exposed which does not result in the plant ceasing to grow altogether without the capacity to resume growth. Mild stress in the sense of the invention leads to a reduction in the growth of the stressed plants of less than 40%, 35% or 30%, preferably less than 25%, 20% or 15%, more preferably less than 14%, 13%, 12%, 11% or 10% or less in comparison to the control plant under non-stress conditions. Due to advances in agricultural practices (irrigation, fertilization, pesticide treatments) severe stresses are not often encountered in cultivated crop plants. As a consequence, the compromised growth induced by mild stress is often an undesirable feature for agriculture. Mild stresses are the typical stresses to which a plant may be exposed. These stresses may be the everyday biotic and/or abiotic (environmental) stresses to which a plant is exposed. Typical abiotic or environmental stresses include temperature stresses caused by atypical hot or cold/freezing temperatures; salt stress; water stress (drought or excess water), anaerobic stress, chemical toxicity and oxidative stress. The abiotic stress may be an osmotic stress caused by a water stress (particularly due to drought), salt stress, oxidative stress or an ionic stress. Chemicals may also cause abiotic stresses (for example too high or too low concentrations of minerals or nutrients). Biotic stresses are typically those stresses caused by pathogens, such as bacteria, viruses, fungi and insects. The term “non-stress conditions” as used herein are those environmental conditions that do not significantly go beyond the everyday climatic and other abiotic conditions that plants may encounter, and which allow optimal growth of the plant. Persons skilled in the art are aware of normal soil conditions and climatic conditions for a given geographic location.

[0193] Abiotic stress leads to a series of morphological, physiological, biochemical and molecular changes that adversely affect plant growth and productivity (Wang et al. (Planta (2003) 218: 1-14). Drought, salinity, extreme temperatures and oxidative stress are known to be interconnected and may induce growth and cellular damage through similar mechanisms. For example, drought and/or salinisation are manifested primarily as osmotic stress, resulting in the disruption of homeostasis and ion distribution in the cell. Oxidative stress, which frequently accompanies high or low temperature, salinity or drought stress may cause denaturation of functional and structural proteins. As a consequence, these diverse environmental stresses often activate similar cell signaling pathways and cellular responses, such as the production of stress proteins, up-regulation of anti-oxidants, accumulation of compatible solutes and growth arrest.

[0194] Since diverse environmental stresses activate similar pathways, the exemplification of the present invention with drought stress (in the case of use of nucleic acids encoding NAC4 transcription factors, and NAC4 transcription factors themselves, in the methods of the invention) should not be seen as a limitation to drought stress, but more as a screen to indicate the involvement of NAC4-encoding nucleic acids and NAC4 transcription factors in abiotic stresses in general. Furthermore, the methods of the present invention may be performed under non-stress conditions or under conditions of mild drought to give plants having enhanced yield-related traits (particularly increased yield and seed yield) relative to control plants.

[0195] A particularly high degree of “cross talk” is reported between drought stress and high-salinity stress (Rabbani et al. (2003) Plant Physiol 133: 1755-1767). For example, drought and/or salinisation are manifested primarily as osmotic stress, resulting in the disruption of homeostasis and ion distribution in the cell. Therefore, it would be apparent that nucleic acids encoding NAC4 transcription factors, and NAC4 transcription factors themselves would, along with their usefulness in conferring drought-tolerance in plants, also find use in protecting the plant against various other osmotic stresses. Similarly, it would be apparent that nucleic acids encoding NAC4 transcription factors, and NAC4 transcription factors themselves would, along with their usefulness in conferring salt-tolerance in plants, also find use in protecting the plant against various other abiotic stresses. Furthermore, oxidative stress, which frequently accompanies high or low temperatures, salinity or drought stress, may cause denaturing of functional and structural proteins. As a consequence, these diverse environmental stresses often activate similar cell signaling pathways and cellular responses, such as the production of stress proteins, up-regulation of anti-oxidants, accumulation of compatible solutes and growth arrest. Furthermore, Rabbani et al. (2003, Plant Physiol 133: 1755-1767) report that similar molecular mechanisms of stress tolerance and responses exist between dicots and monocots. The methods of the invention are therefore advantageously applicable to any plant.

[0196] The term “abiotic stress” as defined herein is taken to mean any one or more of: water stress (due to drought or excess water), anaerobic stress, salt stress, nutrient stress, temperature stress (due to hot, cold or freezing temperatures), chemical toxicity stress and oxidative stress. According to one aspect of the invention, the abiotic stress is an osmotic stress, selected from water stress, salt stress, oxidative stress and ionic stress. Preferably, the water stress is drought stress. The term salt stress is not restricted to common salt (NaCl), but may be any one or more of: NaCl, KCl, LiCl, MgCl₂, CaCl₂, Phosphorous salts, amongst others. Nutrient stress may be caused by a lack or excess of nutrients such as nitrogen, phosphates and other phosphorous-containing compounds, potassium, calcium, cadmium, magnesium, manganese, iron and boron, amongst others.

[0197] Increased tolerance to abiotic stress is manifested by increased plant yield under abiotic stress conditions as defined above. Insofar as the invention concerns the use of NAC4 transcription factors and their encoding nucleic acids, such increased yield may include one or more of the following: increased seed size, increased seed weight, increased aboveground biomass, increased plant height, increased root biomass, increased number of flowers per panicle and increased number of first panicles, each relative to control plants.

[0198] According to the present invention, there is provided a method for enhancing yield-related traits in plants grown under abiotic stress conditions relative to control plants, comprising modulating expression in a plant of a nucleic acid encoding a NAC4 transcription factor. According to one aspect of the invention, the abiotic stress is osmotic stress, selected from one or more of the following: water stress, salt stress, oxidative stress, nutrient stress and ionic stress. Preferably, the water stress is drought stress.

[0199] The methods of the invention are advantageously applicable to any plant.

[0200] Plants that are particularly useful in the methods of the invention include all plants which belong to the superfamily Viridiplantae, in particular monocotyledonous and dicotyledonous plants including fodder or forage legumes, ornamental plants, food crops, trees or shrubs. According to a preferred embodiment of the present invention, the plant is a crop plant. Examples of crop plants include soybean, sunflower, canola, alfalfa, rapeseed, cotton, tomato, potato and tobacco. Further preferably, the plant is a monocotyledonous plant. Examples of monocotyledonous plants include sugarcane. More preferably the plant is a cereal. Examples of cereals include rice, maize, wheat, barley, millet, triticale, rye, sorghum and oats. Plants in which early vigour is a particularly desirably trait include rice, maize, wheat, sunflower, sorghum.

[0201] The present invention also encompasses use of nucleic acids encoding NAC transcription factors and use of NAC transcription factor polypeptides in enhancing yield-related traits.

[0202] Nucleic acids encoding NAC transcription factors or NAC transcription factors themselves, may find use in breeding programmes in which a DNA marker is identified which may be genetically linked to a NAC transcription factor-encoding gene. The nucleic acids/genes, or the NAC transcription factors themselves may be used to define a molecular marker. This DNA or protein marker may then be used in breeding programmes to select plants having enhanced yield as defined hereinabove in the methods of the invention.

[0203] Allelic variants of NAC transcription factor-encoding nucleic acids/genes may also find use in marker-assisted breeding programmes. Such breeding programmes sometimes require introduction of allelic variation by mutagenic treatment of the plants, using for example EMS mutagenesis; alternatively, the programme may start with a collection of allelic variants of so called “natural” origin caused unintentionally. Identification of allelic variants then takes place, for example, by PCR. This is followed by a step for selection of superior allelic variants of the sequence in question and which give increased yield. Selection is typically carried out by monitoring growth performance of plants containing different allelic variants of the sequence in question. Growth performance may be monitored in a greenhouse or in the field. Further optional steps include crossing plants in which the superior allelic variant was identified with another plant. This could be used, for example, to make a combination of interesting phenotypic features.

[0204] Nucleic acids encoding NAC transcription factors may also be used as probes for genetically and physically mapping the genes that they are a part of, and as markers for traits linked to those genes. Such information may be useful in plant breeding in order to develop lines with desired phenotypes. Such use of NAC transcription factor encoding nucleic acids requires only a nucleic acid sequence of at least 15 nucleotides in length. The NAC transcription factor-encoding nucleic acids may be used as restriction fragment length polymorphism (RFLP) markers. Southern blots (Sambrook J, Fritsch E F and Maniatis T (1989) Molecular Cloning, A Laboratory Manual) of restriction-digested plant genomic DNA may be probed with the NAC transcription factor-encoding nucleic acids. The resulting banding patterns may then be subjected to genetic analyses using computer programs such as MapMaker (Lander et al. (1987) Genomics 1: 174-181) in order to construct a genetic map. In addition, the nucleic acids may be used to probe Southern blots containing restriction endonuclease-treated genomic DNAs of a set of individuals representing parent and progeny of a defined genetic cross. Segregation of the DNA polymorphisms is noted and used to calculate the position of the NAC transcription factor-encoding nucleic acid in the genetic map previously obtained using this population (Botstein et al. (1980) Am. J. Hum. Genet. 32:314-331).

[0205] The production and use of plant gene-derived probes for use in genetic mapping is described in Bematzky and Tanksley (1986) Plant Mol. Biol. Reporter 4: 37-41. Numerous publications describe genetic mapping of specific cDNA clones using the methodology outlined above or variations thereof. For example, F2 intercross populations, backcross populations, randomly mated populations, near isogenic lines, and other sets of individuals may be used for mapping. Such methodologies are well known to those skilled in the art.

[0206] The nucleic acid probes may also be used for physical mapping (i.e., placement of sequences on physical maps; see Hoheisel et al. In: Non-mammalian Genomic Analysis: A Practical Guide, Academic press 1996, pp. 319-346, and references cited therein).

[0207] In another embodiment, the nucleic acid probes may be used in direct fluorescence in situ hybridisation (FISH) mapping (Trask (1991) Trends Genet. 7:149-154). Although current methods of FISH mapping favor use of large clones (several kb to several hundred kb; see Laan et al. (1995) Genome Res. 5:13-20), improvements in sensitivity may allow performance of FISH mapping using shorter probes.

[0208] The present invention further provides a method for enhancing yield-related traits in plants relative to control plants, comprising modulating expression in a plant of a nucleic acid encoding an AP2-2 polypeptide.

[0209] A preferred method for modulating (preferably, increasing) expression of a nucleic acid encoding an AP2-2 polypeptide is by introducing and expressing in a plant a nucleic acid encoding an AP2-2 polypeptide.

[0210] The term “AP2-2 polypeptide” as defined herein refers to a transcription factor that classifies as an ERF protein, and more particularly as a member of Group VII of the ERF proteins, according to the definition by Nakano et al. (2006). Group VII of ERF proteins is, besides the presence of a single AP2/ERF domain, which is part of all ERF proteins, also characterised by other motifs, such as CMVII-1 to CMVII-8 (Nakano et al., 2006). These CMVII motifs were delineated based on analysis of Arabidopsis thaliana and Oryza sativa sequences and are part of the Arabidopsis and/or rice sequences (FIG. 2), but may also be present in Group VII ERF proteins of other species.

[0211] The AP2-2 polypeptide useful in the methods of the present invention comprises the conserved

sequence Motif XII (SEQ ID NO: 133):
(R/I/V/L/K)(R/K/Q/D/E/A)(I/L)(R/Y/H)G(A/S/R/K/T/D/
G/H/L/N)(K/T/R/N/G)A(K/R/E)(V/L/P/T)NF(P/V)
Preferably, motif XII is
(R/I/K)(R/K/Q/D/A)(I/L)(R/Y/H)G(A/S/R/K/T/D/E/G/H/
L/N)(K/T/R/N/G)A(K/R/E)(V/L/P/T)NF(P/V/A)

[0212] Preferably, the AP2-2 polypeptide useful in the methods of the present invention furthermore also comprises one or more of the following motifs:

Motif XIII (SEQ ID NO: 134):
MCGG(A/S)(I/V/L)(I/L)(S/H/A/Y/G/P/E)(D/G/H/Y/E/Q/
N)
Preferably, motif XIII is
MCGG(A/S)I(I/L)(S/H/A/Y)(D/G/H/Y/E)
More preferably motif XIII is
MCGG(A/S)I(I/L)(S/H)(D/G/H/E)
Motif XIV (SEQ /D NO: 135)
(K/N/R/S/H/M/Q/P/A/E)(R/K/H/A/G/E/V/P/M)(E/K/A/R/
S/Q/T/V/G/H/P)(R/K/Q/S/G)(K/G/P/S/R/T/A/N)(T/N/R/
S/A/Y/H/G)(L/Q/H/V/R/K/A/P/G)(Y/F)(R/W/K/L/M)G(I/
V)(R/Q/H)(R/Q/W/K)R(P/K/T)
Preferably, motif XIV is:
(K/N/R/S/H/M)(R/K/H/A/G/E/V/P)(E/K/A/R/S/Q)(R/K/Q/
S)(K/G/P/S/R/T)(T/N/R/S/A/Y/H/G)(L/Q/H/V/R/K/A/P/
G/F/I)(Y/F/L)(R/W/K/L/M/H)G(I/V)(R/Q/H)(R/Q/W/K)R
(P/K/T)
More preferably, motif XIV is:
(K/N/R/S)(R/K/H)(E/K/A/R)(R/K/Q)(K/G/P/S)(T/N/R/S/
A)(L/Q/H/V/R/K)(Y/F)(R/W/K)G(I/V)R(R/Q)RP
Most preferably, motif XIV is:
(K/N)(R/H)KRKNQ(Y/F)RGIRQRP
Motif XV (SEQ ID NO: 136):
SD(Q/T/E/V)(G/S)SNSF(G/D/E/S/N)(C/S)S(D/E)(F/Y/L)
(G/S)(W/Q/L)(E/G/S)(N/E/D)
Preferably, motif XV is:
SD(Q/T)(G/S/A)SNS(F/I)(G/D)(C/S)S(D/E)F(G/S)(W/Q/
L)(E/S)(N/D)
Motif XVI (SEQ /D NO: 137):
(L/I/F/M)W(S/T/N/M)(F/Y/L/I)(D/E/Q/G)(N/D/H/E)(I/
Y/F/S/M/L/V/D/H/N/E/G)
Preferably, motif XVI is
(L/I/M)W(S/T/M)(F/Y/L/I)(D/E/Q/G)(N/D/E)(I/Y/F/S/
M/L/V/D)
More preferably, motif XVI is
(L/I/M)W(S/M)(F/L/I)D(D/E)(I/M/L/V)
Motif XVII (SEQ ID NO 138):
(D/E/S)(F/A/W/D)(E/A)(A/D/L)(D/A/G/E)(F/G/L)(N/E/
R/G/Q/W)(E/G/V/D/R)F(E/K/V/Y/G/D/L/I)(V/R/D/S/N/A/
E)(D/G/T/E/R/A/Y/L/F)
Preferably, motif XVII is
(D/E/S)(F/A/W/D)(E/A)(A/D)(D/A)(F/G)(E/R/Q/W)(E/G/
D/R)F(E/K/Y/G/D/L/I)(V/R/D/S/N/A/E)(D/G/T/E/R)
Further preferably, motif XVII is
(D/E/S)(F/A)(E/A)(A/D)(D/A)F(E/R/Q/W)(E/G/D/R)F(E/
K/Y/G/D)(V/R/D/S/N)(D/G/T/E)
More preferably, motif XVII is
(D/E/S)(F/A)(E/A)(A/D)DF(E/R/Q/W)(E/G)F(E/K/Y)(V/
R/D/S)(D/G/T)
Most preferably, motif XVII is
(D/E)FEADF(E/R/Q)EF(E/K)(V/R/D)(D/G)

[0213] These motifs were derived mainly from Arabidopsis and rice sequences, therefore, one or more conserved substitutions are allowed in these motifs for AP2-2 sequences from other plant species.

[0214] Furthermore, AP2-2 polypeptides (at least in their native form) may have DNA-binding activity. Tools and techniques for measuring DNA-binding activity are well known in the art.

[0215] The terms “domain” and “motif” are defined in the “definitions” section herein. Specialist databases exist for the identification of domains. Examples are given in the “definitions” section herein.

[0216] Analysis of the polypeptide sequence of SEQ ID NO: 132 in the SMART database, revealed there to be an AP2 domain (SMART entry SM00380, FIG. 2). This domain is plant specific and is known to play a role in protein-DNA interactions (binds to the GCC-box, essential for the response to ethylene).

[0217] The present invention is illustrated by transforming plants with the nucleic acid sequence represented by SEQ ID NO: 131, encoding the polypeptide sequence of SEQ ID NO: 132. However, performance of the invention is not restricted to these sequences; the methods of the invention may advantageously be performed using any AP2-2-encoding nucleic acid or AP2-2 polypeptides as defined herein.

[0218] Examples of nucleic acids encoding AP2-2 polypeptides are given in Table 14 of Example 9 herein. Such nucleic acids are useful in performing the methods of the invention. The amino acid sequences given in Table 14 of Example 9 are example sequences of orthologues and paralogues of the AP2-2 polypeptides represented by SEQ ID NO: 132, the terms “orthologues” and “paralogues” being as defined herein. Further orthologues and paralogues may readily be identified by performing a so-called reciprocal blast search.

[0219] The invention also provides hitherto unknown AP2-2-encoding nucleic acids and AP2-2 polypeptides.

[0220] According to a further embodiment of the present invention, there is therefore provided an isolated nucleic acid molecule comprising:

(i) a nucleic acid represented by one of SEQ ID NO: 341, SEQ ID NO: 343, or SEQ ID NO: 345;
(ii) the complement of a nucleic acid represented by one of SEQ ID NO: 341, SEQ ID NO: 343, or SEQ ID NO: 345;
(iii) a nucleic acid encoding a POI polypeptide having, in increasing order of preference, at least 50%, 55%, 60%, 65%, 70%, 75%, 80%, 85%, 90%, 95%, 96%, 97%, 98%, 99% or more sequence identity to the amino acid sequence represented by one of SEQ ID NO: 342, SEQ ID NO: 344, or SEQ ID NO: 346.

[0221] According to a further embodiment of the present invention, there is also provided an isolated polypeptide comprising:

(i) an amino acid sequence represented by one of SEQ ID NO: 342, SEQ ID NO: 344, or SEQ ID NO: 346;
(ii) an amino acid sequence having, in increasing order of preference, at least 50%, 55%, 60%, 65%, 70%, 75%, 80%, 85%, 90%, 95%, 96%, 97%, 98%, 99% or more sequence identity to the amino acid sequence represented by one of SEQ ID NO: 342, SEQ ID NO: 344, or SEQ ID NO: 346;
(iii) derivatives of any of the amino acid sequences given in (i) or (ii) above. Nucleic acid variants may also be useful in practicing the methods of the invention. Examples of such variants include nucleic acids encoding homologues and derivatives of any one of the amino acid sequences given in Table 14 of Example 9, the terms “homologue” and “derivative” being as defined herein. Also useful in the methods of the invention are nucleic acids encoding homologues and derivatives of orthologues or paralogues of any one of the amino acid sequences given in Table 14 of Example 9. Homologues and derivatives useful in the methods of the present invention have substantially the same biological and functional activity as the unmodified protein from which they are derived.

[0222] Further nucleic acid variants useful in practicing the methods of the invention include portions of nucleic acids encoding AP2-2 polypeptides, nucleic acids hybridising to nucleic acids encoding AP2-2 polypeptides, splice variants of nucleic acids encoding AP2-2 polypeptides, allelic variants of nucleic acids encoding AP2-2 polypeptides and variants of nucleic acids encoding AP2-2 polypeptides obtained by gene shuffling. The terms hybridising sequence, splice variant, allelic variant and gene shuffling are as described herein.

[0223] Nucleic acids encoding AP2-2 polypeptides need not be full-length nucleic acids, since performance of the methods of the invention does not rely on the use of full-length nucleic acid sequences. According to the present invention, there is provided a method for enhancing yield-related traits in plants, comprising introducing and expressing in a plant a portion of any one of the nucleic acid sequences given in Table 14 of Example 9, or a portion of a nucleic acid encoding an orthologue, paralogue or homologue of any of the amino acid sequences given in Table 14 of Example 9.

[0224] A portion of a nucleic acid may be prepared, for example, by making one or more deletions to the nucleic acid. The portions may be used in isolated form or they may be fused to other coding (or non-coding) sequences in order to, for example, produce a protein that combines several activities. When fused to other coding sequences, the resultant polypeptide produced upon translation may be bigger than that predicted for the protein portion.

[0225] Portions useful in the methods of the invention, encode an AP2-2 polypeptide as defined herein, and have substantially the same biological activity as the amino acid sequences given in Table 14 of Example 9. Preferably, the portion is a portion of any one of the nucleic acids given in Table 14 of Example 9, or is a portion of a nucleic acid encoding an orthologue or paralogue of any one of the amino acid sequences given in Table 14 of Example 9. Preferably the portion is, in increasing order of preference at least 600, 800, 900 or 1000 consecutive nucleotides in length, the consecutive nucleotides being of any one of the nucleic acid sequences given in Table 14 of Example 9, or of a nucleic acid encoding an orthologue or paralogue of any one of the amino acid sequences given in Table 14 of Example 9. Most preferably the portion is a portion of the nucleic acid of SEQ ID NO: 131. Preferably, the portion encodes an amino acid sequence comprising (any one or more of the domains or motifs defined herein). Preferably, the portion encodes an amino acid sequence which, when used in the construction of a phylogenetic tree, tends to cluster with the group of AP2-2 polypeptides comprising the amino acid sequence represented by SEQ ID NO: 132 rather than with any other group.

[0226] Another nucleic acid variant useful in the methods of the invention is a nucleic acid capable of hybridising, under reduced stringency conditions, preferably under stringent conditions, with a nucleic acid encoding an AP2-2 polypeptide as defined herein, or with a portion as defined herein.

[0227] According to the present invention, there is provided a method for enhancing yield-related traits in plants, comprising introducing and expressing in a plant a nucleic acid capable of hybridizing to any one of the nucleic acids given in Table 14 of Example 9, or comprising introducing and expressing in a plant a nucleic acid capable of hybridising to a nucleic acid encoding an orthologue, paralogue or homologue of any of the nucleic acid sequences given in Table 14 of Example 9.

[0228] Hybridising sequences useful in the methods of the invention encode an AP2-2 polypeptide as defined herein, and have substantially the same biological activity as the amino acid sequences given in Table 14 of Example 9. Preferably, the hybridising sequence is capable of hybridising to any one of the nucleic acids given in Table 14 of Example 9, or to a portion of any of these sequences, a portion being as defined above, or wherein the hybridising sequence is capable of hybridising to a nucleic acid encoding an orthologue or paralogue of any one of the amino acid sequences given in Table 14 of Example 9. Most preferably, the hybridising sequence is capable of hybridising to a nucleic acid as represented by SEQ ID NO: 131 or to a portion thereof. Preferably, the hybridising sequence encodes an amino acid sequence comprising any one or more of the motifs or domains as defined herein. Preferably, the hybridising sequence encodes an amino acid sequence which, when used in the construction of a phylogenetic tree, tends to cluster with the group of AP2-2 polypeptides comprising the amino acid sequence represented by SEQ ID NO: 132 rather than with any other group.

[0229] Another nucleic acid variant useful in the methods of the invention is a splice variant encoding an AP2-2 polypeptide as defined hereinabove, a splice variant being as defined herein.

[0230] According to the present invention, there is provided a method for enhancing yield-related traits in plants, comprising introducing and expressing in a plant a splice variant of any one of the nucleic acid sequences given in Table 14 of Example 9, or a splice variant of a nucleic acid encoding an orthologue, paralogue or homologue of any of the amino acid sequences given in Table 14 of Example 9.

[0231] Preferred splice variants are splice variants of a nucleic acid represented by SEQ ID NO: 131, or a splice variant of a nucleic acid encoding an orthologue or paralogue of SEQ ID NO: 132. Preferably, the amino acid sequence encoded by the splice variant comprises any one or more of the motifs or domains as defined herein. Preferably, the amino acid sequence encoded by the splice variant, when used in the construction of a phylogenetic tree, tends to cluster with the group of AP2-2 polypeptides comprising the amino acid sequence represented by SEQ ID NO: 132 rather than with any other group.

[0232] Another nucleic acid variant useful in performing the methods of the invention is an allelic variant of a nucleic acid encoding an AP2-2 polypeptide as defined hereinabove, an allelic variant being as defined herein.

[0233] According to the present invention, there is provided a method for enhancing yield-related traits in plants, comprising introducing and expressing in a plant an allelic variant of any one of the nucleic acids given in Table 14 of Example 9, or comprising introducing and expressing in a plant an allelic variant of a nucleic acid encoding an orthologue, paralogue or homologue of any of the amino acid sequences given in Table 14 of Example 9.

[0234] The allelic variants useful in the methods of the present invention have substantially the same biological activity as the AP2-2 polypeptide of SEQ ID NO: 132 and any of the amino acids depicted in Table 14 of Example 9. Allelic variants exist in nature, and encompassed within the methods of the present invention is the use of these natural alleles. Preferably, the allelic variant is an allelic variant of SEQ ID NO: 131 or an allelic variant of a nucleic acid encoding an orthologue or paralogue of SEQ ID NO: 132. Preferably, the amino acid encoded by the allelic variant comprises any one or more of the motifs or domains as defined herein. Preferably, the amino acid sequence encoded by the allelic variant, when used in the construction of a phylogenetic tree, tends to cluster with the group of AP2-2 polypeptides comprising the amino acid sequence represented by SEQ ID NO: 132 rather than with any other group.

[0235] Gene shuffling or directed evolution may also be used to generate variants of nucleic acids encoding AP2-2 polypeptides as defined above; the term “gene shuffling” being as defined herein.

[0236] According to the present invention, there is provided a method for enhancing yield-related traits in plants, comprising introducing and expressing in a plant a variant of any one of the nucleic acid sequences given in Table 14 of Example 9, or comprising introducing and expressing in a plant a variant of a nucleic acid encoding an orthologue, paralogue or homologue of any of the amino acid sequences given in Table 14 of Example 9, which variant nucleic acid is obtained by gene shuffling.

[0237] Preferably, the variant nucleic acid obtained by gene shuffling encodes an amino acid sequence comprising any one or more of the motifs or domains as defined herein. Preferably, the amino acid sequence encoded by the variant nucleic acid obtained by gene shuffling, when used in the construction of a phylogenetic tree, tends to cluster with the group of AP2-2 polypeptides comprising the amino acid sequence represented by SEQ ID NO: 132 rather than with any other group.

[0238] Furthermore, nucleic acid variants may also be obtained by site-directed mutagenesis. Several methods are available to achieve site-directed mutagenesis, the most common being PCR based methods (Current Protocols in Molecular Biology. Wiley Eds.).

[0239] Nucleic acids encoding AP2-2 polypeptides may be derived from any natural or artificial source. The nucleic acid may be modified from its native form in composition and/or genomic environment through deliberate human manipulation. Preferably the AP2-2 polypeptide-encoding nucleic acid is from a plant, further preferably from a dicotyledonous plant, more preferably from the family Poaceae, more preferably from the genus Oryza, most preferably from Oryza sativa.

[0240] Performance of the methods of the invention gives plants having enhanced yield-related traits. In particular, performance of the methods of the invention gives plants having increased yield, especially increased seed yield relative to control plants. The terms “yield” and “seed yield” are described in more detail in the “definitions” section herein. However it should be noted that the term “yield-related traits” does not encompass the metabolite content of plant cells and that the enhanced yield-related traits are not the result of increased stress resistance.

[0241] The present invention provides a method for increasing yield, especially seed yield of plants, relative to control plants, which method comprises modulating expression, preferably increasing expression, in a plant of a nucleic acid encoding an AP2-2 polypeptide as defined herein.

[0242] According to a preferred feature of the present invention, performance of the methods of the invention gives plants having an increased growth rate relative to control plants. Therefore, according to the present invention, there is provided a method for increasing the growth rate of plants, which method comprises modulating expression, preferably increasing expression, in a plant of a nucleic acid encoding an AP2-2 polypeptide as defined herein.

[0243] Performance of the methods of the invention gives plants grown under non-stress conditions or under mild drought conditions increased yield relative to suitable control plants grown under comparable conditions. Therefore, according to the present invention, there is provided a method for increasing yield in plants grown under non-stress conditions, which method comprises increasing expression in a plant of a nucleic acid encoding an AP2-2 polypeptide.

[0244] Performance of the methods of the invention gives plants grown under conditions of nutrient deficiency, particularly under conditions of nitrogen deficiency, increased yield relative to control plants grown under comparable conditions. Therefore, according to the present invention, there is provided a method for increasing yield in plants grown under conditions of nutrient deficiency, which method comprises increasing expression in a plant of a nucleic acid encoding a POI polypeptide. Nutrient deficiency may result from a lack of nutrients such as nitrogen, phosphates and other phosphorous-containing compounds, potassium, calcium, cadmium, magnesium, manganese, iron and boron, amongst others.

[0245] The present invention encompasses plants or parts thereof (including seeds) obtainable by the methods according to the present invention. The plants or parts thereof comprise a nucleic acid transgene encoding an AP2-2 polypeptide as defined above.

[0246] The invention also provides genetic constructs and vectors to facilitate introduction and/or expression in plants of nucleic acids encoding AP2-2 polypeptides. The gene constructs may be inserted into vectors, which may be commercially available, suitable for transforming into plants and suitable for expression of the gene of interest in the transformed cells. The invention also provides use of a gene construct as defined herein in the methods of the invention.

[0247] More specifically, the present invention provides a construct comprising:
[0248] (a) a nucleic acid encoding an AP2-2 polypeptide as defined above;
[0249] (b) one or more control sequences capable of driving expression of the nucleic acid sequence of (a); and optionally
[0250] (c) a transcription termination sequence.

[0251] The term “control sequence” and “termination sequence” are as defined herein. Plants are transformed with a vector comprising any of the nucleic acids described above. The skilled artisan is well aware of the genetic elements that must be present on the vector in order to successfully transform, select and propagate host cells containing the sequence of interest. The sequence of interest is operably linked to one or more control sequences (at least to a promoter).

[0252] Advantageously, any type of promoter may be used to drive expression of the nucleic acid sequence. A constitutive promoter is particularly useful in the methods of the invention, preferably the constitutive promoter is a strong constitutive promoters. It should be clear that the applicability of the present invention is not restricted to the AP2-2 polypeptide-encoding nucleic acid represented by SEQ ID NO: 131, nor is the applicability of the invention restricted to expression of an AP2-2 polypeptide-encoding nucleic acid when driven by a constitutive promoter.

[0253] The constitutive promoter is preferably a GOS2 promoter, more preferably the rice GOS2 promoter. See Table 2a in the “definitions” section herein for further examples of constitutive promoters.

[0254] Other control sequences (besides promoter, enhancer, silencer, intron sequences, 3′UTR and/or 5′UTR regions) may be protein and/or RNA stabilizing elements. Such sequences would be known or may readily be obtained by a person skilled in the art.

[0255] The genetic constructs of the invention may further include an origin of replication sequence that is required for maintenance and/or replication in a specific cell type. One example is when a genetic construct is required to be maintained in a bacterial cell as an episomal genetic element (e.g. plasmid or cosmid molecule). Preferred origins of replication include, but are not limited to, the f1-ori and colE1.

[0256] For the detection of the successful transfer of the nucleic acid sequences as used in the methods of the invention and/or selection of transgenic plants comprising these nucleic acids, it is advantageous to use marker genes (or reporter genes). Therefore, the genetic construct may optionally comprise a selectable marker gene. Selectable markers are described in more detail in the “definitions” section herein. The marker genes may be removed or excised from the transgenic cell once they are no longer needed. Techniques for marker removal are known in the art, useful techniques are described above in the definitions section.

[0257] The invention also provides a method for the production of transgenic plants having enhanced yield-related traits relative to control plants, comprising introduction and expression in a plant of any nucleic acid encoding an AP2-2 polypeptide as defined hereinabove.

[0258] More specifically, the present invention provides a method for the production of transgenic plants having increased yield, which method comprises:
[0259] (i) introducing and expressing in a plant or plant cell an AP2-2 polypeptide-encoding nucleic acid; and
[0260] (ii) cultivating the plant cell under conditions promoting plant growth and development.

[0261] The nucleic acid may be introduced directly into a plant cell or into the plant itself (including introduction into a tissue, organ or any other part of a plant). According to a preferred feature of the present invention, the nucleic acid is preferably introduced into a plant by transformation. The term “transformation” is described in more detail in the “definitions” section herein.

[0262] The genetically modified plant cells can be regenerated via all methods with which the skilled worker is familiar. Suitable methods can be found in the abovementioned publications by S. D. Kung and R. Wu, Potrykus or Höfgen and Willmitzer.

[0263] Generally after transformation, plant cells or cell groupings are selected for the presence of one or more markers which are encoded by plant-expressible genes co-transferred with the gene of interest, following which the transformed material is regenerated into a whole plant. To select transformed plants, the plant material obtained in the transformation is, as a rule, subjected to selective conditions so that transformed plants can be distinguished from untransformed plants. For example, the seeds obtained in the above-described manner can be planted and, after an initial growing period, subjected to a suitable selection by spraying. A further possibility consists in growing the seeds, if appropriate after sterilization, on agar plates using a suitable selection agent so that only the transformed seeds can grow into plants. Alternatively, the transformed plants are screened for the presence of a selectable marker such as the ones described above.

[0264] Following DNA transfer and regeneration, putatively transformed plants may also be evaluated, for instance using Southern analysis, for the presence of the gene of interest, copy number and/or genomic organisation. Alternatively or additionally, expression levels of the newly introduced DNA may be monitored using Northern and/or Western analysis, both techniques being well known to persons having ordinary skill in the art.

[0265] The generated transformed plants may be propagated by a variety of means, such as by clonal propagation or classical breeding techniques. For example, a first generation (or T1) transformed plant may be selfed and homozygous second-generation (or T2) transformants selected, and the T2 plants may then further be propagated through classical breeding techniques. The generated transformed organisms may take a variety of forms. For example, they may be chimeras of transformed cells and non-transformed cells; clonal transformants (e.g., all cells transformed to contain the expression cassette); grafts of transformed and untransformed tissues (e.g., in plants, a transformed rootstock grafted to an untransformed scion).

[0266] The present invention clearly extends to any plant cell or plant produced by any of the methods described herein, and to all plant parts and propagules thereof. The present invention extends further to encompass the progeny of a primary transformed or transfected cell, tissue, organ or whole plant that has been produced by any of the aforementioned methods, the only requirement being that progeny exhibit the same genotypic and/or phenotypic characteristic(s) as those produced by the parent in the methods according to the invention.

[0267] The invention also includes host cells containing an isolated nucleic acid encoding an AP2-2 polypeptide as defined hereinabove. Preferred host cells according to the invention are plant cells. Host plants for the nucleic acids or the vector used in the method according to the invention, the expression cassette or construct or vector are, in principle, advantageously all plants, which are capable of synthesizing the polypeptides used in the inventive method.

[0268] The methods of the invention are advantageously applicable to any plant. Plants that are particularly useful in the methods of the invention include all plants which belong to the superfamily Viridiplantae, in particular monocotyledonous and dicotyledonous plants including fodder or forage legumes, ornamental plants, food crops, trees or shrubs. According to a preferred embodiment of the present invention, the plant is a crop plant. Examples of crop plants include soybean, sunflower, canola, alfalfa, rapeseed, cotton, tomato, potato and tobacco. Further preferably, the plant is a monocotyledonous plant. Examples of monocotyledonous plants include sugarcane. More preferably the plant is a cereal. Examples of cereals include rice, maize, wheat, barley, millet, rye, triticale, sorghum and oats.

[0269] The invention also extends to harvestable parts of a plant such as, but not limited to seeds, leaves, fruits, flowers, stems, rhizomes, tubers and bulbs. The invention furthermore relates to products derived, preferably directly derived, from a harvestable part of such a plant, such as dry pellets or powders, oil, fat and fatty acids, starch or proteins.

[0270] According to a preferred feature of the invention, the modulated expression is increased expression. Methods for increasing expression of nucleic acids or genes, or gene products, are well documented in the art. Examples of methods for increasing expression are given in the “definitions” section.

[0271] As mentioned above, a preferred method for modulating (preferably, increasing) expression of a nucleic acid encoding an AP2-2 polypeptide is by introducing and expressing in a plant a nucleic acid encoding an AP2-2 polypeptide; however the effects of performing the method, i.e. enhancing yield-related traits may also be achieved using other well known techniques. A description of some of these techniques will now follow.

[0272] The effects of the invention may also be reproduced using the technique of T-DNA activation or TILLING (Targeted Induced Local Lesions In Genomes); for a description of the same see the “definitions” section.

[0273] The effects of the invention may also be reproduced using homologous recombination; for a description of the same see the “definitions” section.

[0274] The present invention also encompasses use of nucleic acids encoding AP2-2 polypeptides as described herein and use of this AP2-2 polypeptide in enhancing any of the aforementioned yield-related traits in plants.

[0275] Nucleic acids encoding AP2-2 polypeptide described herein, or the AP2-2 polypeptides themselves, may find use in breeding programmes in which a DNA marker is identified which may be genetically linked to an AP2-2 polypeptide-encoding gene. The nucleic acids/genes, or the AP2-2 polypeptides themselves may be used to define a molecular marker. This DNA or protein marker may then be used in breeding programmes to select plants having enhanced yield-related traits as defined hereinabove in the methods of the invention.

[0276] Allelic variants of an AP2-2 polypeptide-encoding nucleic acid/gene may also find use in marker-assisted breeding programmes. Such breeding programmes sometimes require introduction of allelic variation by mutagenic treatment of the plants, using for example EMS mutagenesis; alternatively, the programme may start with a collection of allelic variants of so called “natural” origin caused unintentionally. Identification of allelic variants then takes place, for example, by PCR. This is followed by a step for selection of superior allelic variants of the sequence in question and which give increased yield. Selection is typically carried out by monitoring growth performance of plants containing different allelic variants of the sequence in question. Growth performance may be monitored in a greenhouse or in the field. Further optional steps include crossing plants in which the superior allelic variant was identified with another plant. This could be used, for example, to make a combination of interesting phenotypic features.

[0277] Nucleic acids encoding AP2-2 polypeptides may also be used as probes for genetically and physically mapping the genes that they are a part of, and as markers for traits linked to those genes. Such information may be useful in plant breeding in order to develop lines with desired phenotypes. Such use of AP2-2 polypeptide-encoding nucleic acids requires only a nucleic acid sequence of at least 15 nucleotides in length. The AP2-2 polypeptide-encoding nucleic acids may be used as restriction fragment length polymorphism (RFLP) markers. Southern blots (Sambrook J, Fritsch E F and Maniatis T (1989) Molecular Cloning, A Laboratory Manual) of restriction-digested plant genomic DNA may be probed with the AP2-2-encoding nucleic acids. The resulting banding patterns may then be subjected to genetic analyses using computer programs such as MapMaker (Lander et al. (1987) Genomics 1: 174-181) in order to construct a genetic map. In addition, the nucleic acids may be used to probe Southern blots containing restriction endonuclease-treated genomic DNAs of a set of individuals representing parent and progeny of a defined genetic cross. Segregation of the DNA polymorphisms is noted and used to calculate the position of the AP2-2 polypeptide-encoding nucleic acid in the genetic map previously obtained using this population (Botstein et al. (1980) Am. J. Hum. Genet. 32:314-331).

[0278] The production and use of plant gene-derived probes for use in genetic mapping is described in Bernatzky and Tanksley (1986) Plant Mol. Biol. Reporter 4: 37-41. Numerous publications describe genetic mapping of specific cDNA clones using the methodology outlined above or variations thereof. For example, F2 intercross populations, backcross populations, randomly mated populations, near isogenic lines, and other sets of individuals may be used for mapping. Such methodologies are well known to those skilled in the art.

[0279] The nucleic acid probes may also be used for physical mapping (i.e., placement of sequences on physical maps; see Hoheisel et al. In: Non-mammalian Genomic Analysis: A Practical Guide, Academic press 1996, pp. 319-346, and references cited therein).

[0280] In another embodiment, the nucleic acid probes may be used in direct fluorescence in situ hybridisation (FISH) mapping (Trask (1991) Trends Genet. 7:149-154). Although current methods of FISH mapping favour use of large clones (several kb to several hundred kb; see Laan et al. (1995) Genome Res. 5:13-20), improvements in sensitivity may allow performance of FISH mapping using shorter probes.

[0281] A variety of nucleic acid amplification-based methods for genetic and physical mapping may be carried out using the nucleic acids. Examples can be found in the “definitions” section herein.

[0282] The present invention further provides a method for enhancing yield-related traits in plants relative to control plants, comprising modulating expression in a plant of a nucleic acid encoding an AP2-70-like polypeptide.

[0283] The invention also provides hitherto unknown AP2-70-like-encoding nucleic acids and AP2-70-like polypeptides.

[0284] According to a further embodiment of the present invention, there is therefore provided an isolated nucleic acid molecule comprising:
[0285] (i) a nucleic acid represented by SEQ ID NO: 257;
[0286] (ii) the complement of a nucleic acid represented by SEQ ID NO: 257;
[0287] (iii) a nucleic acid encoding an AP2-70-like polypeptide having, in increasing order of preference, at least 50%, 55%, 60%, 65%, 70%, 75%, 80%, 85%, 90%, 95%, 96%, 97%, 98%, 99% or more sequence identity to the amino acid sequence represented by SEQ ID NO: 258, and having in increasing order of preference at least 50%, 55%, 60%, 65%, 70%, 75%, 80%, 85%, 90%, 95%, 96%, 97%, 98%, 99% or more sequence identity to SEQ ID NO: 331: PFLMQWLNLLPLPVLDSSSWCPEHFHNSESDALP (which represents the C-terminal region of SEQ ID NO: 258).

[0288] According to a further embodiment of the present invention, there is also provided an isolated polypeptide comprising:
[0289] (i) an amino acid sequence represented by SEQ ID NO: 258;
[0290] (ii) an amino acid sequence having, in increasing order of preference, at least 50%, 55%, 60%, 65%, 70%, 75%, 80%, 85%, 90%, 95%, 96%, 97%, 98%, 99% or more sequence identity to the amino acid sequence represented by SEQ ID NO: 258, and having in increasing order of preference at least 50%, 55%, 60%, 65%, 70%, 75%, 80%, 85%, 90%, 95%, 96%, 97%, 98%, 99% or more sequence identity to SEQ ID NO: 331: PFLMQWLNLLPLPVLDSSSWCPEHFHNSESDALP (which represents the C-terminal region of SEQ ID NO: 258);
[0291] (iii) derivatives of any of the amino acid sequences given in (i) or (ii) above.

[0292] A preferred method for modulating (preferably, increasing) expression of a nucleic acid encoding an AP2-70-like polypeptide is by introducing and expressing in a plant a nucleic acid encoding an AP2-70-like polypeptide.

[0293] Any reference hereinafter to a “protein useful in the methods of the invention” is taken to mean an AP2-70-like polypeptide as defined herein. Any reference hereinafter to a “nucleic acid useful in the methods of the invention” is taken to mean a nucleic acid capable of encoding such an AP2-70-like polypeptide. The nucleic acid to be introduced into a plant (and therefore useful in performing the methods of the invention) is any nucleic acid encoding the type of protein which will now be described, hereafter also named “AP2-70-like nucleic acid” or “AP2-70-like gene”.

[0294] AP2-70-like polypeptides as defined below fall within Group Ib (A-6) according to the classification of Nakano et al., 2006.

[0295] An “AP2-70-like polypeptide” as defined herein refers to any polypeptide comprising the following:
[0296] (i) An AP2 DNA-binding domain as represented by SEQ ID NO: 332: YRGVRQRHWGKWVAEIRLPRNRTRLWLGTFDTAEEAALAYDSAAFRLRGESARLNF, or a domain having in increasing order of preference at least 50%, 55%, 60%, 65%, 70%, 75%, 80%, 85%, 90%, 95% or more sequence identity to the domain represented by SEQ ID NO: 332; and
[0297] (ii) Having in increasing order of preference at least 50%, 55%, 60%, 65%, 70%, 75%, 80%, 85%, 90%, 95% or more sequence identity to the (Oryza sativa) polypeptide sequence represented by SEQ ID NO: 258; and
[0298] (iii) Comprising Motif XVIII represented by SEQ ID NO: 333: RLPXNX¹RXRXWLGT F/Y D/E T/S, where X is any amino acid and X¹ is zero, one or more, and up to 30, gaps; and
[0299] (iv) Comprising Motif XIX represented by SEQ ID NO: 334: RG D/E.

[0300] In the AP2 DNA-binding domain described above under (i), YRG and LAYD, as highlighted below, are preferred specific boxes for DNA-binding.

SEQ ID NO: 332:
YRGVRQRHWGKWVAEIRLPRNRTRLWLGTFDTAEEAALAYDSAAFRLRGE
SARLNF.

[0301] Preferably, the AP2 DNA-binding domain described above under (i) comprises at least residues LPRNRTRLWLGTFDT.

[0302] Motif XVIII (SEQ ID NO: 333) is preferably RLP K/R/Q NX¹R T/V/M R L/V WLGT F/Y D/E T/S, where X¹ is zero, one or more, and up to 30, gaps.

[0303] More preferably, Motif XVIII (SEQ ID NO: 333) is RLPRNX¹RTRLWLGTFDT, wherein X¹ is zero, one or more, and up to 30, gaps.

[0304] AP2-70 polypeptides as defined herein may also comprise one or more of the following motifs:

Motif XX/SEQ ID NO: 335: WDESESFLLHKYPSLEIDWDAILS, or a motif having in increasing order of preference at least 50%, 55%, 60%, 65%, 70%, 75%, 80%, 85%, 90%, 95% or more sequence identity to Motif XX. Adapted from Nakano et al., 2006 (CMI-1).
Motif XXI/SEQ ID NO: 336: GPPLHAAVDAKLHAICH, or a motif having in increasing order of preference at least 50%, 55%, 60%, 65%, 70%, 75%, 80%, 85%, 90%, 95% or more sequence identity to Motif XXI. Adapted from Nakano et al., 2006 (CMI-2).
Motif XXII/SEQ ID NO: 337: GANYLTPAQVLHVQAQLQRLRRP, or a motif having in increasing order of preference at least 50%, 55%, 60%, 65%, 70%, 75%, 80%, 85%, 90%, 95% or more sequence identity to Motif XXII. Adapted from Nakano et al., 2006 (CMI-3).
Motif XXIII/SEQ ID NO: 338: VDSKELMGALAPSMVSFSYPCSEQSASS, or a motif having in increasing order of preference at least 50%, 55%, 60%, 65%, 70%, 75%, 80%, 85%, 90%, 95% or more sequence identity to Motif XXIII. Adapted from Nakano et al., 2006 (CMI-4).

[0305] Any of Motifs XVIII and XX to XXIII described above may comprise one, two or three conservative and/or non-conservative change and/or deletion at any position.

[0306] The term “domain” and “motif” is defined in the “definitions” section herein. Specialist databases exist for the identification of domains. Examples are given in the “definitions” section herein.

[0307] Furthermore, AP2-70-like polypeptides (at least in their native form) typically have DNA-binding activity. Tools and techniques for measuring DNA-binding activity are well known in the art.

[0308] The present invention is illustrated by transforming plants with the nucleic acid sequence represented by SEQ ID NO: 257, encoding the polypeptide sequence of SEQ ID NO: 258. However, performance of the invention is not restricted to these sequences; the methods of the invention may advantageously be performed using any AP2-70-like-encoding nucleic acid or AP2-70-like polypeptide as defined herein.

[0309] Examples of nucleic acids encoding AP2-70-like polypeptides are given in Table 18 of Example 18 herein. Such nucleic acids are useful in performing the methods of the invention. The amino acid sequences given in Table 18 of Example 18 are example sequences of orthologues and paralogues of the AP2-70-like polypeptide represented by SEQ ID NO: 258, the terms “orthologues” and “paralogues” being as defined herein.

[0310] Nucleic acid variants may also be useful in practicing the methods of the invention. Examples of such variants include nucleic acids encoding homologues and derivatives of any one of the amino acid sequences given in Table 18 of Example 18, the terms “homologue” and “derivative” being as defined herein. Also useful in the methods of the invention are nucleic acids encoding homologues and derivatives of orthologues or paralogues of any one of the amino acid sequences given in Table 18 of Example 18. Homologues and derivatives useful in the methods of the present invention have substantially the same biological and functional activity as the unmodified protein from which they are derived.

[0311] Further nucleic acid variants useful in practicing the methods of the invention include portions of nucleic acids encoding AP2-70-like polypeptides, nucleic acids hybridising to nucleic acids encoding AP2-70-like polypeptides, splice variants of nucleic acids encoding AP2-70-like polypeptides, allelic variants of nucleic acids encoding AP2-70-like polypeptides and variants of nucleic acids encoding AP2-70-like polypeptides obtained by gene shuffling. The terms hybridising sequence, splice variant, allelic variant and gene shuffling are as described herein.

[0312] Nucleic acids encoding AP2-70-like polypeptides need not be full-length nucleic acids, since performance of the methods of the invention does not rely on the use of full-length nucleic acid sequences. According to the present invention, there is provided a method for enhancing yield-related traits in plants, comprising introducing and expressing in a plant a portion of any one of the nucleic acid sequences given in Table 18 of Example 18, or a portion of a nucleic acid encoding an orthologue, paralogue or homologue of any of the amino acid sequences given in Table 18 of Example 18.

[0313] A portion of a nucleic acid may be prepared, for example, by making one or more deletions to the nucleic acid. The portions may be used in isolated form or they may be fused to other coding (or non-coding) sequences in order to, for example, produce a protein that combines several activities. When fused to other coding sequences, the resultant polypeptide produced upon translation may be bigger than that predicted for the protein portion.

[0314] Portions useful in the methods of the invention, encode an AP2-70-like polypeptide as defined herein, and have substantially the same biological activity as the amino acid sequences given in Table 18 of Example 18. Preferably, the portion is a portion of any one of the nucleic acids given in Table 18 of Example 18, or is a portion of a nucleic acid encoding an orthologue or paralogue of any one of the amino acid sequences given in Table 18 of Example 18. Preferably the portion is, in increasing order of preference at least 600, 650, 700, 750 consecutive nucleotides in length, the consecutive nucleotides being of any one of the nucleic acid sequences given in Table 18 of Example 18, or of a nucleic acid encoding an orthologue or paralogue of any one of the amino acid sequences given in Table 18 of Example 18. Most preferably the portion is a portion of the nucleic acid of SEQ ID NO: 257. Preferably, the portion encodes an amino acid sequence which when used in the construction of a phylogenetic tree, such as the one depicted in FIGS. 3 and 4, tends to cluster with the group of AP2-70-like polypeptides (Group I(A-6), specifically Group Ib: see Nakanao et al., 2006 for classification) comprising the amino acid sequence represented by SEQ ID NO: 258 rather than with any other group.

[0315] Another nucleic acid variant useful in the methods of the invention is a nucleic acid capable of hybridising, under reduced stringency conditions, preferably under stringent conditions, with a nucleic acid encoding an AP2-70-like polypeptide as defined herein, or with a portion as defined herein.

[0316] According to the present invention, there is provided a method for enhancing yield-related traits in plants, comprising introducing and expressing in a plant a nucleic acid capable of hybridizing to any one of the nucleic acids given in Table 18 of Example 18, or comprising introducing and expressing in a plant a nucleic acid capable of hybridising to a nucleic acid encoding an orthologue, paralogue or homologue of any of the nucleic acid sequences given in Table 18 of Example 18.

[0317] Hybridising sequences useful in the methods of the invention encode an AP2-70-like polypeptide as defined herein, and have substantially the same biological activity as the amino acid sequences given in Table 18 of Example 18. Preferably, the hybridising sequence is capable of hybridising to any one of the nucleic acids given in Table 18 of Example 18, or to a portion of any of these sequences, a portion being as defined above, or wherein the hybridising sequence is capable of hybridising to a nucleic acid encoding an orthologue or paralogue of any one of the amino acid sequences given in Table 18 of Example 18. Most preferably, the hybridising sequence is capable of hybridising to a nucleic acid as represented by SEQ ID NO: 257 or to a portion thereof.

[0318] Preferably, the hybridising sequence encodes an amino acid sequence which when used in the construction of a phylogenetic tree, such as the one depicted in FIGS. 3 and 4, tends to cluster with the group of AP2-70-like polypeptides (Group I(A-6), specifically Group Ib: see Nakanao et al., 2006 for classification) comprising the amino acid sequence represented by SEQ ID NO: 258 rather than with any other group.

[0319] Another nucleic acid variant useful in the methods of the invention is a splice variant encoding an AP2-70-like polypeptide as defined hereinabove, a splice variant being as defined herein.

[0320] According to the present invention, there is provided a method for enhancing yield-related traits in plants, comprising introducing and expressing in a plant a splice variant of any one of the nucleic acid sequences given in Table 18 of Example 18, or a splice variant of a nucleic acid encoding an orthologue, paralogue or homologue of any of the amino acid sequences given in Table 18 of Example 18.

[0321] Preferred splice variants are splice variants of a nucleic acid represented by SEQ ID NO: 257, or a splice variant of a nucleic acid encoding an orthologue or paralogue of SEQ ID NO: 258. Preferably, the amino acid sequence encoded by the splice variant, when used in the construction of a phylogenetic tree, such as the one depicted in FIGS. 3 and 4, tends to cluster with the group of AP2-70-like polypeptides (Group I(A-6), specifically Group Ib: see Nakanao et al., 2006 for classification) comprising the amino acid sequence represented by SEQ ID NO: 258 rather than with any other group.

[0322] Another nucleic acid variant useful in performing the methods of the invention is an allelic variant of a nucleic acid encoding an AP2-70-like polypeptide as defined hereinabove, an allelic variant being as defined herein.

[0323] According to the present invention, there is provided a method for enhancing yield-related traits in plants, comprising introducing and expressing in a plant an allelic variant of any one of the nucleic acids given in Table 18 of Example 18, or comprising introducing and expressing in a plant an allelic variant of a nucleic acid encoding an orthologue, paralogue or homologue of any of the amino acid sequences given in Table 18 of Example 18.

[0324] The allelic variants useful in the methods of the present invention have substantially the same biological activity as the AP2-70-like polypeptide of SEQ ID NO: 258 and any of the amino acids depicted in Table 18 of Example 18. Allelic variants exist in nature, and encompassed within the methods of the present invention is the use of these natural alleles. Preferably, the allelic variant is an allelic variant of SEQ ID NO: 257 or an allelic variant of a nucleic acid encoding an orthologue or paralogue of SEQ ID NO: 258. Preferably, the amino acid sequence encoded by the allelic variant, when used in the construction of a phylogenetic tree, such as the one depicted in FIGS. 3 and 4, tends to cluster with the AP2-70-like polypeptides (Group I(A-6), specifically Group Ib: see Nakanao et al., 2006 for classification) comprising the amino acid sequence represented by SEQ ID NO: 258 rather than with any other group.

[0325] Gene shuffling or directed evolution may also be used to generate variants of nucleic acids encoding AP2-70-like polypeptides as defined above; the term “gene shuffling” being as defined herein.

[0326] According to the present invention, there is provided a method for enhancing yield-related traits in plants, comprising introducing and expressing in a plant a variant of any one of the nucleic acid sequences given in Table 18 of Example 18, or comprising introducing and expressing in a plant a variant of a nucleic acid encoding an orthologue, paralogue or homologue of any of the amino acid sequences given in Table 18 of Example 18, which variant nucleic acid is obtained by gene shuffling.

[0327] Preferably, the amino acid sequence encoded by the variant nucleic acid obtained by gene shuffling, when used in the construction of a phylogenetic tree such as the one depicted in FIGS. 3 and 4, tends to cluster with the group of AP2-70-like polypeptides (Group I(A-6), specifically Group Ib: see Nakanao et al., 2006 for classification) comprising the amino acid sequence represented by SEQ ID NO: 258 rather than with any other group.

[0328] Furthermore, nucleic acid variants may also be obtained by site-directed mutagenesis. Several methods are available to achieve site-directed mutagenesis, the most common being PCR based methods (Current Protocols in Molecular Biology. Wiley Eds.).

[0329] Nucleic acids encoding AP2-70-like polypeptides may be derived from any natural or artificial source. The nucleic acid may be modified from its native form in composition and/or genomic environment through deliberate human manipulation. Preferably the AP2-70-like polypeptide-encoding nucleic acid is from a plant, further preferably from a monocotyledonous plant, more preferably from the family poaceae, most preferably the nucleic acid is from Oryza sativa.

[0330] Performance of the methods of the invention gives plants having enhanced yield-related traits. In particular performance of the methods of the invention gives plants having increased yield, especially increased seed yield relative to control plants. The terms “yield” and “seed yield” are described in more detail in the “definitions” section herein.

[0331] The present invention provides a method for increasing yield, especially seed yield of plants, relative to control plants, which method comprises modulating expression, preferably increasing expression, in a plant of a nucleic acid encoding an AP2-70-like polypeptide as defined herein.

[0332] According to a preferred feature of the present invention, performance of the methods of the invention gives plants having an increased growth rate relative to control plants. Therefore, according to the present invention, there is provided a method for increasing the growth rate of plants, which method comprises modulating expression, preferably increasing expression, in a plant of a nucleic acid encoding an AP2-70-like polypeptide as defined herein.

[0333] Performance of the methods of the invention gives plants grown under non-stress conditions or under mild drought conditions increased yield relative to suitable control plants grown under comparable conditions. Therefore, according to the present invention, there is provided a method for increasing yield in plants grown under non-stress conditions or under mild drought conditions, which method comprises increasing expression in a plant of a nucleic acid encoding an AP2-70-like polypeptide.

[0334] Performance of the methods of the invention gives plants grown under conditions of nutrient deficiency, particularly under conditions of nitrogen deficiency, increased yield relative to control plants grown under comparable conditions. Therefore, according to the present invention, there is provided a method for increasing yield in plants grown under conditions of nutrient deficiency, which method comprises increasing expression in a plant of a nucleic acid encoding an AP2-70-like polypeptide. Nutrient deficiency may result from a lack or excess of nutrients such as nitrogen, phosphates and other phosphorous-containing compounds, potassium, calcium, cadmium, magnesium, manganese, iron and boron, amongst others.

[0335] The present invention encompasses plants or parts thereof (including seeds) obtainable by the methods according to the present invention. The plants or parts thereof comprise a nucleic acid transgene encoding an AP2-70-like polypeptide as defined above.

[0336] The invention also provides genetic constructs and vectors to facilitate introduction and/or expression in plants of nucleic acids encoding AP2-70-like polypeptides. The gene constructs may be inserted into vectors, which may be commercially available, suitable for transforming into plants and suitable for expression of the gene of interest in the transformed cells. The invention also provides use of a gene construct as defined herein in the methods of the invention.

[0337] More specifically, the present invention provides a construct comprising:
[0338] (d) a nucleic acid encoding an AP2-70-like polypeptide as defined above;
[0339] (e) one or more control sequences capable of driving expression of the nucleic acid sequence of (a); and optionally
[0340] (f) a transcription termination sequence.

[0341] Preferably, the nucleic acid encoding an AP2-70-like polypeptide is:
[0342] (i) a nucleic acid represented by SEQ ID NO: 257;
[0343] (ii) the complement of a nucleic acid represented by SEQ ID NO: 257;
[0344] (iv) a nucleic acid encoding an AP2-70-like polypeptide having, in increasing order of preference, at least 50%, 55%, 60%, 65%, 70%, 75%, 80%, 85%, 90%, 95%, 96%, 97%, 98%, 99% or more sequence identity to the amino acid sequence represented by SEQ ID NO: 258, and having in increasing order of preference at least 50%, 55%, 60%, 65%, 70%, 75%, 80%, 85%, 90%, 95%, 96%, 97%, 98%, 99% or more sequence identity to SEQ ID NO: 331: PFLMQWLNLLPLPVLDSSSWCPEHFHNSESDALP (which represents the C-terminal region of SEQ ID NO: 258).

[0345] The term “control sequence” and “termination sequence” are as defined herein.

[0346] Plants are transformed with a vector comprising any of the nucleic acids described above. The skilled artisan is well aware of the genetic elements that must be present on the vector in order to successfully transform, select and propagate host cells containing the sequence of interest. The sequence of interest is operably linked to one or more control sequences (at least to a promoter).

[0347] Advantageously, any type of promoter, whether natural or synthetic, may be used to drive expression of the nucleic acid sequence. A constitutive promoter is particularly useful in the methods. See the “Definitions” section herein for definitions of the various promoter types. Also useful in the methods of the invention is a root-specific promoter.

[0348] It should be clear that the applicability of the present invention is not restricted to the AP2-70-like polypeptide-encoding nucleic acid represented by SEQ ID NO: 257, nor is the applicability of the invention restricted to expression of an AP2-70-like polypeptide-encoding nucleic acid when driven by a constitutive promoter, or when driven by a root-specific promoter.

[0349] The constitutive promoter is preferably a GOS2 promoter, preferably a GOS2 promoter from rice. Further preferably the constitutive promoter is represented by a nucleic acid sequence substantially similar to SEQ ID NO: 39 or SEQ ID NO: 339 most preferably the constitutive promoter is as represented by SEQ ID NO: 39 or SEQ ID NO: 339. See Table 2a in the “Definitions” section herein for further examples of constitutive promoters.

[0350] According to another preferred feature of the invention, the nucleic acid encoding an AP2-70-like polypeptide is operably linked to a root-specific promoter. The root-specific promoter is preferably an RCc3 promoter (Plant Mol Biol. 1995 January; 27(2):237-48), more preferably the RCc3 promoter is from rice, further preferably the RCc3 promoter is represented by a nucleic acid sequence substantially similar to SEQ ID NO: 110 or SEQ ID NO: 340, most preferably the promoter is as represented by SEQ ID NO: 110. Examples of other root-specific promoters which may also be used to perform the methods of the invention are shown in Table 2b herein.

[0351] For the detection of the successful transfer of the nucleic acid sequences as used in the methods of the invention and/or selection of transgenic plants comprising these nucleic acids, it is advantageous to use marker genes (or reporter genes). Therefore, the genetic construct may optionally comprise a selectable marker gene. Selectable markers are described in more detail in the “definitions” section herein.

[0352] The invention also provides a method for the production of transgenic plants having enhanced yield-related traits relative to control plants, comprising introduction and expression in a plant of any nucleic acid encoding an AP2-70-like polypeptide as defined hereinabove.

[0353] More specifically, the present invention provides a method for the production of transgenic plants having increased enhanced yield-related traits, particularly increased (seed) yield, which method comprises:
[0354] (iii) introducing and expressing in a plant or plant cell an AP2-70-like polypeptide-encoding nucleic acid; and
[0355] (iv) cultivating the plant cell under conditions promoting plant growth and development.

[0356] The nucleic acid of (i) may be any of the nucleic acids capable of encoding an AP2-70-like polypeptide as defined herein. Preferably, the nucleic acid is:
[0357] (i) a nucleic acid represented by SEQ ID NO: 257;
[0358] (ii) the complement of a nucleic acid represented by SEQ ID NO: 257;
[0359] (iii) a nucleic acid encoding an AP2-70-like polypeptide having, in increasing order of preference, at least 50%, 55%, 60%, 65%, 70%, 75%, 80%, 85%, 90%, 95%, 96%, 97%, 98%, 99% or more sequence identity to the amino acid sequence represented by SEQ ID NO: 258, and having in increasing order of preference at least 50%, 55%, 60%, 65%, 70%, 75%, 80%, 85%, 90%, 95%, 96%, 97%, 98%, 99% or more sequence identity to SEQ ID NO: 331: PFLMQWLNLLPLPVLDSSSWCPEHFHNSESDALP (which represents the C-terminal region of SEQ ID NO: 258).

[0360] The nucleic acid may be introduced directly into a plant cell or into the plant itself (including introduction into a tissue, organ or any other part of a plant). According to a preferred feature of the present invention, the nucleic acid is preferably introduced into a plant by transformation. The term “transformation” is described in more detail in the “definitions” section herein.

[0361] The genetically modified plant cells can be regenerated via all methods with which the skilled worker is familiar. Suitable methods can be found in the abovementioned publications by S. D. Kung and R. Wu, Potrykus or Höfgen and Willmitzer.

[0362] Generally after transformation, plant cells or cell groupings are selected for the presence of one or more markers which are encoded by plant-expressible genes co-transferred with the gene of interest, following which the transformed material is regenerated into a whole plant. To select transformed plants, the plant material obtained in the transformation is, as a rule, subjected to selective conditions so that transformed plants can be distinguished from untransformed plants. For example, the seeds obtained in the above-described manner can be planted and, after an initial growing period, subjected to a suitable selection by spraying. A further possibility consists in growing the seeds, if appropriate after sterilization, on agar plates using a suitable selection agent so that only the transformed seeds can grow into plants. Alternatively, the transformed plants are screened for the presence of a selectable marker such as the ones described above.

[0363] Following DNA transfer and regeneration, putatively transformed plants may also be evaluated, for instance using Southern analysis, for the presence of the gene of interest, copy number and/or genomic organisation. Alternatively or additionally, expression levels of the newly introduced DNA may be monitored using Northern and/or Western analysis, both techniques being well known to persons having ordinary skill in the art.

[0364] The generated transformed plants may be propagated by a variety of means, such as by clonal propagation or classical breeding techniques. For example, a first generation (or T1) transformed plant may be selfed and homozygous second-generation (or T2) transformants selected, and the T2 plants may then further be propagated through classical breeding techniques. The generated transformed organisms may take a variety of forms. For example, they may be chimeras of transformed cells and non-transformed cells; clonal transformants (e.g., all cells transformed to contain the expression cassette); grafts of transformed and untransformed tissues (e.g., in plants, a transformed rootstock grafted to an untransformed scion).

[0365] The present invention clearly extends to any plant cell or plant produced by any of the methods described herein, and to all plant parts and propagules thereof. The present invention extends further to encompass the progeny of a primary transformed or transfected cell, tissue, organ or whole plant that has been produced by any of the aforementioned methods, the only requirement being that progeny exhibit the same genotypic and/or phenotypic characteristic(s) as those produced by the parent in the methods according to the invention.

[0366] The invention also includes host cells containing an isolated nucleic acid encoding a AP2-70-like polypeptide as defined hereinabove. Preferred host cells according to the invention are plant cells. Host plants for the nucleic acids or the vector used in the method according to the invention, the expression cassette or construct or vector are, in principle, advantageously all plants, which are capable of synthesizing the polypeptides used in the inventive method.

[0367] The methods of the invention are advantageously applicable to any plant. Plants that are particularly useful in the methods of the invention include all plants which belong to the superfamily Viridiplantae, in particular monocotyledonous and dicotyledonous plants including fodder or forage legumes, ornamental plants, food crops, trees or shrubs. According to a preferred embodiment of the present invention, the plant is a crop plant. Examples of crop plants include soybean, sunflower, canola, alfalfa, rapeseed, cotton, tomato, potato and tobacco. Further preferably, the plant is a monocotyledonous plant. Examples of monocotyledonous plants include sugarcane. More preferably the plant is a cereal. Examples of cereals include rice, maize, wheat, barley, millet, rye, triticale, sorghum and oats.

[0368] The invention also extends to harvestable parts of a plant such as, but not limited to seeds, leaves, fruits, flowers, stems, rhizomes, tubers and bulbs. The invention furthermore relates to products derived, preferably directly derived, from a harvestable part of such a plant, such as dry pellets or powders, oil, fat and fatty acids, starch or proteins.

[0369] According to a preferred feature of the invention, the modulated expression is increased expression. Methods for increasing expression of nucleic acids or genes, or gene products, are well documented in the art. Examples are given in the “definitions” section herein.

[0370] As mentioned above, a preferred method for modulating (preferably, increasing) expression of a nucleic acid encoding an AP2-70-like polypeptide is by introducing and expressing in a plant a nucleic acid encoding an AP2-70-like polypeptide; however the effects of performing the method, i.e. enhancing yield-related traits may also be achieved using other well known techniques. A description of some of these techniques can be found in the “definitions” section.

[0371] The effects of the invention may also be reproduced using the technique of T-DNA activation or TILLING (Targeted Induced Local Lesions In Genomes); for a description of the same see the “definitions” section.

[0372] The effects of the invention may also be reproduced using homologous recombination; for a description of the same see the “definitions” section.

[0373] The present invention also encompasses use of nucleic acids encoding AP2-70-like polypeptides as described herein and use of these AP2-70-like polypeptide in enhancing any of the aforementioned yield-related traits in plants.

[0374] Nucleic acids encoding AP2-70-like polypeptide described herein, or the AP2-70-like polypeptides themselves, may find use in breeding programmes in which a DNA marker is identified which may be genetically linked to an AP2-70-like polypeptide-encoding gene. The nucleic acids/genes, or the AP2-70-like polypeptides themselves may be used to define a molecular marker. This DNA or protein marker may then be used in breeding programmes to select plants having enhanced yield-related traits as defined hereinabove in the methods of the invention.

[0375] Allelic variants of an AP2-70-like polypeptide-encoding nucleic acid/gene may also find use in marker-assisted breeding programmes. Such breeding programmes sometimes require introduction of allelic variation by mutagenic treatment of the plants, using for example EMS mutagenesis; alternatively, the programme may start with a collection of allelic variants of so called “natural” origin caused unintentionally. Identification of allelic variants then takes place, for example, by PCR. This is followed by a step for selection of superior allelic variants of the sequence in question and which give increased yield. Selection is typically carried out by monitoring growth performance of plants containing different allelic variants of the sequence in question. Growth performance may be monitored in a greenhouse or in the field. Further optional steps include crossing plants in which the superior allelic variant was identified with another plant. This could be used, for example, to make a combination of interesting phenotypic features.

[0376] Nucleic acids encoding AP2-70-like polypeptides may also be used as probes for genetically and physically mapping the genes that they are a part of, and as markers for traits linked to those genes. Such information may be useful in plant breeding in order to develop lines with desired phenotypes. Such use of AP2-70-like polypeptide-encoding nucleic acids requires only a nucleic acid sequence of at least 15 nucleotides in length. The AP2-70-like polypeptide-encoding nucleic acids may be used as restriction fragment length polymorphism (RFLP) markers. Southern blots (Sambrook J, Fritsch E F and Maniatis T (1989) Molecular Cloning, A Laboratory Manual) of restriction-digested plant genomic DNA may be probed with the AP2-70-like-encoding nucleic acids. The resulting banding patterns may then be subjected to genetic analyses using computer programs such as MapMaker (Lander et al. (1987) Genomics 1: 174-181) in order to construct a genetic map. In addition, the nucleic acids may be used to probe Southern blots containing restriction endonuclease-treated genomic DNAs of a set of individuals representing parent and progeny of a defined genetic cross. Segregation of the DNA polymorphisms is noted and used to calculate the position of the AP2-70-like polypeptide-encoding nucleic acid in the genetic map previously obtained using this population (Botstein et al. (1980) Am. J. Hum. Genet. 32:314-331).

[0377] The production and use of plant gene-derived probes for use in genetic mapping is described in Bernatzky and Tanksley (1986) Plant Mol. Biol. Reporter 4: 37-41. Numerous publications describe genetic mapping of specific cDNA clones using the methodology outlined above or variations thereof. For example, F2 intercross populations, backcross populations, randomly mated populations, near isogenic lines, and other sets of individuals may be used for mapping. Such methodologies are well known to those skilled in the art.

[0378] The nucleic acid probes may also be used for physical mapping (i.e., placement of sequences on physical maps; see Hoheisel et al. In: Non-mammalian Genomic Analysis: A Practical Guide, Academic press 1996, pp. 319-346, and references cited therein).

[0379] In another embodiment, the nucleic acid probes may be used in direct fluorescence in situ hybridisation (FISH) mapping (Trask (1991) Trends Genet. 7:149-154). Although current methods of FISH mapping favour use of large clones (several kb to several hundred kb; see Laan et al. (1995) Genome Res. 5:13-20), improvements in sensitivity may allow performance of FISH mapping using shorter probes.

[0380] The methods according to the present invention result in plants having enhanced yield-related traits, as described hereinbefore. These traits may also be combined with other economically advantageous traits, such as further yield-enhancing traits, tolerance to other abiotic and biotic stresses, traits modifying various architectural features and/or biochemical and/or physiological features.

### DESCRIPTION OF FIGURES

[0381] The present invention will now be described with reference to the following figures in which:

[0382] FIG. 1 shows a phylogenetic tree taken from Ooka et al., 2003 (DNA Research 10, 239-247). The dashed box 3^{rd} from the bottom, marked “OsNAC7”, is the group comprising the sequence of SEQ ID NO: 2. The cluster of NACs starting from ONAC022 until OsNAC3, represent the cluster comprising the sequences of SEQ ID NO: 51, SEQ ID NO: 53, SEQ ID NO: 55, SEQ ID NO: 57 and SEQ ID NO: 59. Amino acid sequences clustering in these groups (the amino acid sequences given in Tables 3 and 4, for example) are considered to be useful in the methods of the invention.

[0383] FIG. 2 shows the sequence of SEQ ID NO: 132 with (A): Putative nuclear localisation signal, (B): AP2/ERF DNA binding domain, (1): CMVII-1 motif, (3): CMVII-3 motif, (4): CMVII-4 motif, (5): CMVII-5 motif, (6): CMVII-6 motif, (7): CMVII-7 motif, (8): CMVII-8 motif. The CMVII motifs were identified according to Nakano et al. (2006).

[0384] FIG. 3 shows a phylogenetic tree taken from Nakano et al. (Plant Physiol. Vol. 140, 2006) in which the group indicated as I(A-6) includes the group of AP2-70-like polypeptides defined herein.

[0385] FIG. 4 shows a section of a phylogenetic tree comprising AP2-70-like polypeptide sequences defined herein and expanding the group indicated as Group I(A-6) in Nakano et al., 2006. The phylogenetic tree was constructed using a neighbour-joining clustering algorithm as provided in the AlignX programme from the Vector NTI (Invitrogen).

[0386] FIG. 5 shows an alignment of NAC transcription factors as defined hereinabove. The sequences were aligned using AlignX program from Vector NTI suite (InforMax, Bethesda, Md.). Multiple alignment was done with a gap opening penalty of 10 and a gap extension of 0.01. Minor manual editing was also carried out where necessary to better position some conserved regions. The NAC domain and Motifs I to III are indicated.

[0387] FIG. 6 shows an alignment of NAC transcription factors as defined hereinabove. The sequences were aligned using AlignX program from Vector NTI suite (InforMax, Bethesda, Md.). Multiple alignment was done with a gap opening penalty of 10 and a gap extension of 0.01. Minor manual editing was also carried out where necessary to better position some conserved regions. The NAC domain and Motifs IV to XI are indicated.

[0388] FIG. 7 shows a CLUSTAL W multiple sequence alignment of AP2-2 polypeptides from Arabidopsis and rice. SEQ ID NO: 132 (Os06g09390) is indicated in bold and the conserved regions (motifs XII to XVII, SEQ ID NO: 133 to SEQ ID NO: 138) are underlined.

[0389] FIG. 8 shows an alignment of AP2-70-like polypeptides with Motifs XVIII and XIX indicated and with the AP2 DNA-binding domain also indicated.

[0390] FIG. 9 shows a binary vector p163, for increased expression in Oryza sativa of an Oryza sativa NAC transcription factor-encoding nucleic acid under the control of a GOS2 promoter (internal reference PRO0129).

[0391] FIG. 10 shows a binary vector p164, for increased expression in Oryza saliva of an Oryza saliva NAC1 (SEQ ID NO: 50) transcription factor-encoding nucleic acid under the control of a GOS2 promoter (internal reference PRO0129) for constitutive expression.

[0392] FIG. 11 shows a binary vector p165, for increased expression in Oryza saliva of an Oryza saliva NAC4 (SEQ ID NO: 52) transcription factor-encoding nucleic acid under the control of a GOS2 promoter (internal reference PRO0129) for constitutive expression.

[0393] FIG. 12 shows a binary vector p166, for increased expression in Oryza saliva of an Oryza saliva NAC4 (SEQ ID NO: 52) transcription factor-encoding nucleic acid under the control of an RCc3 promoter (internal reference PRO0110) for root-specific expression.

[0394] FIG. 13 shows a binary vector p167, for increased expression in Oryza sativa of an Oryza sativa NAC transcription factor-encoding nucleic acid under the control of a protochlorophylid reductase promoter (internal reference PRO0123).

[0395] FIG. 14 shows a binary vector p167, for increased expression in Oryza saliva of an Oryza sativa NAC6 (SEQ ID NO: 54) transcription factor-encoding nucleic acid under the control of an RCc3 promoter (internal reference PRO0110) for root-specific expression.

[0396] FIG. 15 shows a binary vector p168, for increased expression in Oryza saliva of an Oryza saliva NAC7 (SEQ ID NO: 56) transcription factor-encoding nucleic acid under the control of a GOS2 promoter (internal reference PRO0129) for constitutive expression.

[0397] FIG. 16 shows a binary vector p169, for increased expression in Oryza saliva of an Oryza saliva NAC3 (SEQ ID NO: 58) transcription factor-encoding nucleic acid under the control of an RCc3 promoter (internal reference PRO0110) for root-specific expression.

[0398] FIG. 17 shows a binary vector pGOS2::NAC1, for increased expression in Oryza saliva of an Oryza sativa NAC1 (SEQ ID NO: 50) transcription factor-encoding nucleic acid under the control of a GOS2 promoter for constitutive expression.

[0399] FIG. 18 shows a binary vector pGOS2::NAC4, for increased expression in Oryza saliva of an Oryza saliva NAC4 (SEQ ID NO: 52) transcription factor-encoding nucleic acid under the control of a GOS2 promoter for constitutive expression.

[0400] FIG. 19 shows a binary vector pRCc3::NAC4, for increased expression in Oryza sativa of an Oryza sativa NAC4 (SEQ ID NO: 52) transcription factor-encoding nucleic acid under the control of an RCc3 promoter for root-specific expression.

[0401] FIG. 20 shows a binary vector pRCc3::NAC6, for increased expression in Oryza saliva of an Oryza saliva NAC6 (SEQ ID NO: 54) transcription factor-encoding nucleic acid under the control of an RCc3 promoter for root-specific expression.

[0402] FIG. 21 shows a binary vector pGOS2::NAC7, for increased expression in Oryza sativa of an Oryza sativa NAC7 (SEQ ID NO: 56) transcription factor-encoding nucleic acid under the control of a GOS2 promoter for constitutive expression.

[0403] FIG. 22 shows a binary vector pRCc3::NAC3, for increased expression in Oryza saliva of an Oryza saliva NAC3 (SEQ ID NO: 58) transcription factor-encoding nucleic acid under the control of an RCc3 promoter for root-specific expression.

[0404] FIG. 23 shows the binary vector for increased expression in Oryza sativa of a rice AP2-2 protein-encoding nucleic acid under the control of a GOS2 promoter.

[0405] FIG. 24 shows the binary vector for increased expression in Oryza saliva of an Oryza sativa AP2-70-like protein-encoding nucleic acid under the control of a rice RCC3 promoter (pRCC3).

[0406] FIG. 25 shows the binary vector for increased expression in Oryza saliva of an Oryza sativa AP2-70-like protein-encoding nucleic acid under the control of a rice GOS2 promoter (pGOS2).

[0407] FIGS. 26 to 29 details examples of sequences useful in performing the methods according to the present invention.

### EXAMPLES

[0408] The present invention will now be described with reference to the following examples, which are by way of illustration alone. The following examples are not intended to completely define or otherwise limit the scope of the invention.

### A) OsNAM2

### Example 1

### Cloning of OsNAM2 cDNA

[0409] Total cellular RNA from 2-week-old rice seedlings was used to clone OsNAM2 cDNA. RNA was extracted using an RNeasy Kit (Qiagen, Germany). OsNAM2 cDNA was 1292 bp long, from 5′ UTR (untranslated region) to the stop codon. Two overlapping cDNAs were joined in the OsNAM2 cDNA clone. A 5′ cDNA of 1025 bp was obtained by 5′ RACE-PCR using an adapter primer (5′-AAGCAGTGGTATCAACGCAGAGTACGCGGG-3′) and the OsNAM2 specific primer (OsNAM2-2) (5′-CTC TCC AGA GGC GGC ATC ATG TCG GA-3′). The 5′ RACE-PCR was performed with the BD SMART™ RACE cDNA Amplification Kit (Clontech, USA). The adapter primer (SMART II A Oligonucleotide) was as provided by the manufacturer. The 3′ cDNA of 620 bp was obtained by PCR with two OsNAM2-specific primers (NAM2-1 (5′-TGA TCG GGA TGA GGA AGA C-3′) and NAM2-3 (5′-GAT CAG TCT CGG TCA TCG ATG-3′)). The first-stranded cDNA as PCR template was synthesized with the Oligotex mRNA kit (Qiagen, Valencia, Calif.). Candidate PCR products were gel-purified, subcloned into the pGEM-T Easy (Promega, USA), and confirmed by sequencing. The vector harboring the 5′ cDNA was cut with HindIII and ligated with a HindIII fragment of the 3′ cDNA vector. The result was a 1292 bp OsNAM2 cDNA.

### Example 2

### Vector Construction

### 2.1 OsNAM2 Under the Control of a GOS2 Promoter

[0410] The entry clone was subsequently used in an LR reaction with a destination vector used for Oryza sativa transformation. This vector contains as functional elements within the T-DNA borders: a plant selectable marker; a screenable marker expression cassette; and a Gateway cassette intended for LR in vivo recombination with the nucleic acid sequence of interest already cloned in the entry clone. A rice GOS2 promoter (SEQ ID NO: 39 or SEQ ID NO: 339) for constitutive expression (internal reference PRO0129) was located upstream of this Gateway cassette.

[0411] After the LR recombination step, the resulting expression vector p163 (FIG. 9) was transformed into Agrobacterium strain LBA4044 and subsequently to Oryza sativa plants. Transformed rice plants were allowed to grow and were then examined for the parameters described below.

### 2.2 OsNAM2 Under the Control of a Protochlorophylid Reductase Promoter

[0412] The entry clone was subsequently used in an LR reaction with a destination vector used for Oryza sativa transformation. This vector contains as functional elements within the T-DNA borders: a plant selectable marker; a screenable marker expression cassette; and a Gateway cassette intended for LR in vivo recombination with the nucleic acid sequence of interest already cloned in the entry clone. A protochlorophylid reductase promoter (SEQ ID NO: 40) for green tissue-specific expression (internal reference PRO0123) was located upstream of this Gateway cassette.

[0413] After the LR recombination step, the resulting expression vector p167 (FIG. 13) was transformed into Agrobacterium strain LBA4044 and subsequently to Oryza sativa plants. Transformed rice plants were allowed to grow and were then examined for the parameters described below.

### Example 3

### Evaluation Procedure

### 3.1 Evaluation Setup

[0414] Approximately 30 independent T0 rice transformants were generated. The primary transformants were transferred from a tissue culture chamber to a greenhouse for growing and harvest of T1 seed. Seven events, of which the T1 progeny segregated 3:1 for presence/absence of the transgene, were retained. For each of these events, approximately 10 T1 seedlings containing the transgene (hetero- and homo-zygotes) and approximately 10 T1 seedlings lacking the transgene (nullizygotes) were selected by monitoring visual marker expression. The transgenic plants and the corresponding nullizygotes were grown side-by-side at random positions. Greenhouse conditions were of shorts days (12 hours light), 28° C. in the light and 22° C. in the dark, and a relative humidity of 70%. From the stage of sowing until the stage of maturity the plants were passed several times through a digital imaging cabinet. At each time point digital images (2048×1536 pixels, 16 million colours) were taken of each plant from at least 6 different angles.

### 3.2 Statistical Analysis: T-Test and F-Test

[0415] A two factor ANOVA (analysis of variants) was used as a statistical model for the overall evaluation of plant phenotypic characteristics. An F-test was carried out on all the parameters measured of all the plants of all the events transformed with the gene of the present invention. The F-test was carried out to check for an effect of the gene over all the transformation events and to verify an overall effect of the gene, also known as a global gene effect. The threshold for significance for a true global gene effect was set at a 5% probability level for the F-test. A significant F-test value points to a gene effect, meaning that it is not only the mere presence or position of the gene that is causing the differences in phenotype.

[0416] To check for an effect of the genes within an event, i.e., for a line-specific effect, a t-test was performed within each event using data sets from the transgenic plants and the corresponding null plants. “Null plants” or “null segregants” or “nullizygotes” are the plants treated in the same way as the transgenic plant, but from which the transgene has segregated. Null plants can also be described as the homozygous negative transformed plants. The threshold for significance for the t-test is set at 10% probability level. The results for some events can be above or below this threshold. This is based on the hypothesis that a gene might only have an effect in certain positions in the genome, and that the occurrence of this position-dependent effect is not uncommon. This kind of gene effect is also named herein a “line effect of the gene”. The p-value is obtained by comparing the t-value to the t-distribution or alternatively, by comparing the F-value to the F-distribution. The p-value then gives the probability that the null hypothesis (i.e., that there is no effect of the transgene) is correct.

### Example 4

### Evaluation Results

### 4.1 OsNAM2 Under the Control of a GOS2 Promoter

[0417] There was an increase in aboveground area, number of panicles, the number of flowers per panicle and the total number of seeds for transgenic plants expressing an OsNAM2 gene under the control of a GOS2 promoter compared to nullizygotes. There was a significant increase in the number of flowers per panicle and the total number of seeds for transgenic plants compared to nullizygotes. There was a >12% increase (average for 4 events) in the number of flowers per panicle for transgenic plants compared to nullizygotes, with a significant p-value from the F-test of <0.0014. Furthermore, there was a 35% increase in the total number of seeds for transgenic plants compared to nullizygotes, with a significant p-value from the F-test of <0.0045.

### 4.2 OsNAM2 Under the Control of a Protochlorophylid Reductase Promoter

[0418] There was an increase in aboveground area, number of panicles and the total number of seeds for transgenic plants expressing an OsNAM2 gene under the control of a protochlorophylid reductase promoter compared to nullizygotes. There was a >16% increase (average for 2 events) in the aboveground area for transgenic plants compared to nullizygotes, with a significant p-value from the F-test of <0.0014. There was a >16% increase in the number of panicles for transgenic plants compared to nullizygotes and a >18% increase in the total number of seeds for transgenic plants compared to nullizygotes.

### B) OsNAC1, 3, 4, 6, and 7

### Example 5

### Cloning of OsNAC1, 3, 4, 6, and 7

[0419] Oryza sativa genes containing a NAC domain, OsNAC1 (Gene bank accession number AK067690), OsNAC3 (AK069257), OsNAC4 (AK068392), OsNAC6 (AK102475) and OsNAC7 (AK107330), were identified to be stress-inducible in rice by expression profiling conducted with the 60K Rice Whole Genome Microarray (GreenGene Biotech Inc., Korea). This microarray contained 70-mer oligonucleotide probes with sequences corresponding to 58,417 known or predicted ORFs covering the entire rice genome (Oh et al., 2005 Plant Physiology 138: 341-351). The full-length cDNAs of OsNAC1 and OsNAC3 were obtained from rice EST stocks generated by GreenGene Biotech Inc. These cDNAs were inserted into EcoR1 and Xho1 sites of Bluescript SKII (Stratagene). The full-length cDNAs of OsNAC4, OsNAC6 and OsNAC7 were amplified by PCR using as template an Oryza sativa seedling cDNA library (GreenGene Biotech, Korea). After reverse transcription of RNA extracted from 14-day-old seedlings that were treated with 400 mM NaCl for 6 hours, the cDNAs were cloned into Uni-ZAP XR (Stratagene). Average insert size of the library was 1.5 kb and original number of plaques was of the order of 1.106 pfu. Original titre was determined to be 2.109 pfu/ml after first amplification of 2.106 pfu/ml. 0.1 μg of cDNA library was used in each 50 μl PCR mixture. PCR primers that were used for the amplification of the OsNAC genes are listed in Table 7. PCR amplifications were performed using Pfu DNA polymerase in standard conditions. The DNA fragments were amplified and purified also using standard methods. PCR products were ligated into EcoR1site of pBluescript SKII and sequenced.

TABLE 7
List of primers used for isolation of OsNACs.

| | | |
|---|---|---|
| Gene | Forward Primers | Reverse Primers |

| | | |
|---|---|---|
| OsNAC4 | 5′CCAACACTAGTAGGATAAA | 5′ACCACTGGGCTAATTAATT |
| | G3′ | A3′ |
| OsNAC6 | 5′GGTCGACCCACGCGTCCGC | 5′AACTGAAGTACCCGTTCTT |
| | T3′ | A3′ |
| OsNAC7 | 5′ATCCTCCACAAGAGAAACT | 5′AGTACAGTGTAGCACAATA |
| | A3′ | A3′ |

### Example 6

### Expression Vector Construction

### 6.1 GOS2 Constructs

[0420] The entry clone was subsequently used in an LR reaction with a destination vector used for Oryza sativa transformation. This vector contains as functional elements within the T-DNA borders: a plant selectable marker; a screenable marker expression cassette; and a Gateway cassette intended for LR in vivo recombination with the nucleic acid sequence of interest already cloned in the entry clone. A rice GOS2 promoter (SEQ ID NO: 39) for constitutive expression (internal reference PRO0129) was located upstream of this Gateway cassette.

[0421] After the LR recombination step, the resulting expression vectors p164 (FIG. 10), p165 (FIG. 11) and p168 (FIG. 15) were each transformed into Agrobacterium strain LBA4044 and subsequently to Oryza sativa plants. Transformed rice plants were allowed to grow and were then examined for the parameters described below.

### 6.2 RCc3 Constructs

[0422] The entry clone was subsequently used in an LR reaction with a destination vector used for Oryza sativa transformation. This vector contains as functional elements within the T-DNA borders: a plant selectable marker; a screenable marker expression cassette; and a Gateway cassette intended for LR in vivo recombination with the nucleic acid sequence of interest already cloned in the entry clone. A rice RCc3 promoter (SEQ ID NO: 110) for root-specific expression (internal reference PRO0110) was located upstream of this Gateway cassette.

[0423] After the LR recombination step, the resulting expression vector p166 (FIG. 12), p167 (FIG. 14) and p169 (FIG. 16) were each transformed into Agrobacterium strain LBA4044 and subsequently to Oryza sativa plants. Transformed rice plants were allowed to grow and were then examined for the parameters described below.

### Example 7

### Evaluation Procedure

### 7.1 Evaluation Setup

[0424] Approximately 30 independent T0 rice transformants were generated. The primary transformants were transferred from a tissue culture chamber to a greenhouse for growing and harvest of T1 seed. Seven events, of which the T1 progeny segregated 3:1 for presence/absence of the transgene, were retained. For each of these events, approximately 10 T1 seedlings containing the transgene (hetero- and homo-zygotes) and approximately 10 T1 seedlings lacking the transgene (nullizygotes) were selected by monitoring visual marker expression. The transgenic plants and the corresponding nullizygotes were grown side-by-side at random positions. Greenhouse conditions were of shorts days (12 hours light), 28° C. in the light and 22° C. in the dark, and a relative humidity of 70%. From the stage of sowing until the stage of maturity the plants were passed several times through a digital imaging cabinet. At each time point digital images (2048×1536 pixels, 16 million colours) were taken of each plant from at least 6 different angles.

### Drought Screen

[0425] Plants from five events (T2 seeds) were grown in potting soil under normal conditions until they approached the heading stage. They were then transferred to a “dry” section where irrigation was withheld. Humidity probes were inserted in randomly chosen pots to monitor the soil water content (SWC). When SWC went below certain thresholds, the plants were automatically re-watered continuously until a normal level was reached again. The plants were then re-transferred again to normal conditions. The rest of the cultivation (plant maturation, seed harvest) was the same as for plants not grown under abiotic stress conditions. A confirmation round was performed consisting of repeating the screen with T2 seeds not harvested from plants of the first drought screen, but from plants grown under normal conditions.

### Parameters Measured

[0426] The plant aboveground area (or leafy biomass) was determined by counting the total number of pixels on the digital images from aboveground plant parts discriminated from the background. This value was averaged for the pictures taken on the same time point from the different angles and was converted to a physical surface value expressed in square mm by calibration. Experiments show that the aboveground plant area measured this way correlates with the biomass of plant parts above ground. The Areamax is the above ground area at the time point at which the plant had reached its maximal leafy biomass.

[0427] The mature primary panicles were harvested, bagged, barcode-labelled and then dried for three days in the oven at 37° C. The panicles were then threshed and all the seeds collected. The filled husks were separated from the empty ones using an air-blowing device. After separation, both seed lots were then counted using a commercially available counting machine. The empty husks were discarded. The filled husks were weighed on an analytical balance and the cross-sectional area of the seeds was measured using digital imaging. This procedure resulted in the set of the following seed-related parameters:

[0428] The flowers-per-panicle estimates the average number of florets per panicle on a plant, derived from the number of total seeds divided by the number of first panicles. The tallest panicle and all the panicles that overlapped with the tallest panicle when aligned vertically, were considered as first panicles and were counted manually. The number of filled seeds was determined by counting the number of filled husks that remained after the separation step. The total seed yield (total seed weight) was measured by weighing all filled husks harvested from a plant. Total seed number per plant was measured by counting the number of husks harvested from a plant and corresponds to the number of florets per plant. Thousand Kernel Weight (TKW) is extrapolated from the number of filled seeds counted and their total weight. Harvest index is defined as the ratio between the total seed weight and the above-ground area (mm²), multiplied by a factor 10⁶. The parameter EmerVigor is an indication of the seedling vigour. It is calculated from the area (in mm²) covered by leafy biomass in the first imaging. The seed fill rate (fillrate) is an indication of the filling of the seeds. It is expressed as a proportion (in %) of the number of filled seeds over the number of florets (nrtotalseed).

[0429] These parameters were derived in an automated way from the digital images using image analysis software and were analysed statistically. Individual seed parameters (including width, length, area, weight) were measured using a custom-made device consisting of two main components, a weighing and imaging device, coupled to software for image analysis.

### 7.2 Statistical Analysis: T-Test and F-Test

[0430] A two factor ANOVA (analysis of variants) was used as a statistical model for the overall evaluation of plant phenotypic characteristics. An F-test was carried out on all the parameters measured of all the plants of all the events transformed with the gene of the present invention. The F-test was carried out to check for an effect of the gene over all the transformation events and to verify an overall effect of the gene, also known as a global gene effect. The threshold for significance for a true global gene effect was set at a 5% probability level for the F-test. A significant F-test value points to a gene effect, meaning that it is not only the mere presence or position of the gene that is causing the differences in phenotype.

[0431] To check for an effect of the genes within an event, i.e., for a line-specific effect, a t-test was performed within each event using data sets from the transgenic plants and the corresponding null plants. “Null plants” or “null segregants” or “nullizygotes” are the plants treated in the same way as the transgenic plant, but from which the transgene has segregated. Null plants can also be described as the homozygous negative transformed plants. The threshold for significance for the t-test is set at 10% probability level. The results for some events can be above or below this threshold. This is based on the hypothesis that a gene might only have an effect in certain positions in the genome, and that the occurrence of this position-dependent effect is not uncommon. This kind of gene effect is also named herein a “line effect of the gene”. The p-value was obtained by comparing the t-value to the t-distribution or alternatively, by comparing the F-value to the F-distribution. The p-value then gives the probability that the null hypothesis (i.e., that there is no effect of the transgene) is correct.

### Example 8

### Evaluation Results

### 8.1 NAC1 Under the Control of a GOS2 Promoter

[0432] An increase in the following yield-related parameters was observed for transgenic plants overexpressing NAC1 under the control of a GOS2 promoter. The p-value shown is from the t-test unless otherwise indicated. The percentage difference is for transgenic plants compared to nullizygotes. Although not shown in Table 8, an increase in root biomass was also observed, with the best event giving a 7% increase compared to nullizygotes.

TABLE 8
Results for NAC1 under the control of a GOS2 promoter

| Trait | Positive events | Average difference | p value |
|---|---|---|---|
| Area max | 6 events | 13.70% | <0.077 |
| | | overall +11% | 0 |
| | | | (F test) |
| Emergence vigour | 5 events | 29.60% | <0.225 |
| | | overall +16% | <0.0108 |
| | | | (F test) |
| TKW | 5 events | 5.40% | <0.097 |
| | | overall +3% | 0 |
| | | | (F test) |
| First panicles | 3 events | 20.33% | <0.061 |
| Total number seeds | 2 events | 16 | <0.15 |

### 8.2 NAC4 Under the Control of a GOS2 Promoter

[0433] An increase in the following yield-related parameters was observed for transgenic plants overexpressing NAC4 under the control of a GOS2 promoter. The p-value shown is from the t-test unless otherwise indicated. The percentage difference is for transgenic plants compared to nullizygotes. Although not shown in the Table 9a, an increase in seed weight was also observed, with the best event giving a 30% increase compared to nullizygotes. Table 9a shows the results obtained under non-stress conditions and Table 9b shows the results obtained under conditions of stress.

TABLE 9a
Results for NAC4 under the control of a GOS2 promoter

| Trait | Positive events | Average difference | p value |
|---|---|---|---|
| Area max | 3 events | 18.33% | <0.051 |
| | | overall +9% | <0.0023 |
| | | | (F test) |
| Emergence vigor | 3 events | 30.67% | <0.38 |
| Root max | 2 events | 10.50% | <0.088 |
| TKW | 4 events | 6.50% | <0.042 |
| | | overall +4% | 0 |
| | | | (F test) |
| First panicles | 3 events | 15.67% | <0.34 |
| Total number seeds | 3 events | 13.33 | <0.281 |
| | | overall +5% | <0.091 |
| | | | (F test) |

TABLE 9b
Results for NAC4 under the control of a GOS2 promoter (drought screen)

| Trait | Positive events | Average difference | p value |
|---|---|---|---|
| Area max | 2 events | 10.5% | <0.0011 |
| | | overall +8% | 0 |
| | | | (F test) |
| Emergence vigor | 3 events | 42% | <0.0007 |
| TKW | 3 events | 4% | <0.042 |
| | | overall +4.66% | <0.0251 |
| | | | (F test) |
| First panicles | 3 events | 4.33% | <0.091 |
| | | Overall +2% | <0.00275 |
| | | | (F test) |
| Root thin | 2 events | 6% | <0.0901 |

### 8.3 NAC4 Under the Control of an RCc3 Promoter

[0434] An increase in the following yield-related parameters was observed for transgenic plants overexpressing NAC4 under the control of an RCc3 promoter. The p-value shown is from the t-test unless otherwise indicated. The percentage difference is for transgenic plants compared to nullizygotes. Although not shown in Table 10a, an increase in thousand kernel weight was also observed, with the best event giving a 4% increase compared to nullizygotes.

TABLE 10a
Results for NAC4 under the control of an RCc3 promoter

| Trait | Positive events | Average difference | p value |
|---|---|---|---|
| Area max | 2 events | 13.00% | <0.0125 |
| | | overall +4% | <0.0313 |
| | | | (F test) |
| Emergence vigour | 2 events | 13.50% | <0.288 |
| | | overall +7% | <0.11 |
| | | | (F test) |
| Root max | 1 event | 9.00% | <0.0597 |
| | | overall +4% | <0.0722 |
| | | | (F test) |
| Total seed yield | 2 events | 16.00% | <0.094 |
| | | overall +6% | <0.0733 |
| | | | (F test) |
| Total number seeds | 2 events | 14.5 | <0.137 |

TABLE 10b
Results for NAC4 under the control of an RCc3 promoter
(drought screen)

| Trait | Positive events | Average difference | p value |
|---|---|---|---|
| Area max | 2 events | 8% | <0.1077 |
| Total seed yield | 2 events | 49% | <0.018 |
| | | Overall +20% | 0.002 |
| | | | (F test) |
| Number filled seeds | 2 events | 50.5% | <0.0138 |
| | | Overall +20% | 0.0017 |
| | | | (F test) |
| Fill rate | 2 events | 46.5% | <0.0418 |
| | | Overall +16% | 0.011 |
| | | | (F test) |
| Harvest Index | 2 events | 47% | <0.0168 |
| | | Overall +19% | 0.0037 |
| Height | 2 events | 6.5% | <0.0103 |
| Number total seeds | 2 events | 26% | <0.0579 |
| | | Overall +4% | 0.1951 |
| | | | (F test |
| Root max | 2 events | 6.5% | <0.1038 |
| Flower per panicle | 2 events | 17.5% | <0.1019 |

### 8.4 NAC6 Under the Control of an RCc3 Promoter

[0435] An increase in the following yield-related parameters was observed for transgenic plants overexpressing NAC6 under the control of an RCc3 promoter. The p-value shown is from the t-test unless otherwise indicated. The percentage difference is for transgenic plants compared to nullizygotes. Although not shown in Table 11, an increase in the number of flowers per panicle was also observed, with the best event giving a 20% increase compared to nullizygotes. Furthermore, and also not shown in the table, an increase in the number of panicles was also observed, with the best event giving a 28% increase compared to nullizygotes.

TABLE 11
Results for NAC6 under the control of an RCc3 promoter

| Trait | Positive events | Average difference | p value |
|---|---|---|---|
| Area max | 2 events | 17.50% | <0.0104 |
| Emergence vigor | 2 events | 21.00% | <0.2385 |
| Root max | 3 events | 13.33% | <0.0093 |
| | | overall +5.00% | <0.0673 |
| | | | (F test) |
| rootshoot index | 4 events | 64.00% | <0.1279 |
| | | overall +37% | <0.0005 |
| | | | (F test) |
| Total seed yield | 2 events | 20.00% | <0.2378 |
| Total number seeds | 2 events | 20% | <0.0323 |

### 8.5 NAC7 Under the Control of a GOS2 Promoter

[0436] An increase in the following yield-related parameters was observed for transgenic plants overexpressing NAC7 under the control of a GOS2 promoter. The p-value shown is from the t-test unless otherwise indicated. The percentage difference is for transgenic plants compared to nullizygotes.

TABLE 12
Results for NAC7 under the control of a GOS2 promoter

| Trait | Positive events | Average difference | p value |
|---|---|---|---|
| Area max | 3 events | 18.33% | <0.011 |
| | | overall +11% | 0 |
| | | | (F test) |
| Emergence vigor | 3 events | 17.33% | <0.422 |
| Root max | 1 event | 11.00% | <0.0249 |
| | | overall +4% | <0.0370 |
| | | | (F test) |
| Total seed yield | 2 events | 20.50% | <0.08 |
| Flower per panicle | 3 events | 10% | <0.101 |
| First panicles | | 19.00% | <0.0769 |
| Total number seeds | 2 events | 15% | <0.177 |
| | | overall +5% | <0.0751 |
| | | | (F test) |

### 8.6 NAC3 Under the Control of an RCc3 Promoter

[0437] An increase in the following yield-related parameters was observed for transgenic plants overexpressing NAC3 under the control of an RCc3 promoter. The p-value shown is from the t-test unless otherwise indicated. The percentage difference is for transgenic plants compared to nullizygotes. Although not shown in Table 13, An increase in aboveground area was observed (with the best event giving a 19% increase), an increase in early vigour (with the best event giving a 20% increase), an increase in root biomass (with the best event giving a 15% increase), an increase in thousand kernel weight, an increase in harvest index (with the best event giving an increase of 26%), an increase in the number of panicles (with the best event giving an increase of 33%).

TABLE 13
Results for NAC3 under the control of an RCc3 promoter

| Trait | Positive events | Average difference | p value |
|---|---|---|---|
| Total seed yield | 2 events | 29.00% | <0.00777 |
| | | overall +6% | <0.00553 |
| | | | (F test) |
| Total number seeds | 1 event | 44% | <0.0001 |
| | | overall +5% | <0.1084 |
| | | | (F test) |

### C) AP2-2 polypeptide

### Example 9

### Identification of Sequences Related to SEQ ID NO: 131 and SEQ ID NO: 132

[0438] Sequences (full length cDNA, ESTs or genomic) related to SEQ ID NO: 131 and/or protein sequences related to SEQ ID NO: 132 were identified amongst those maintained in the Entrez Nucleotides database at the National Center for Biotechnology Information (NCBI) using database sequence search tools, such as the Basic Local Alignment Tool (BLAST) (Altschul et al. (1990) J. Mol. Biol. 215:403-410; and Altschul et al. (1997) Nucleic Acids Res. 25:3389-3402). The program was used to find regions of local similarity between sequences by comparing nucleic acid or polypeptide sequences to sequence databases and by calculating the statistical significance of matches. The polypeptide encoded by SEQ ID NO: 131 was used for the TBLASTN algorithm, with default settings and the filter to ignore low complexity sequences set off. The output of the analysis was viewed by pairwise comparison, and ranked according to the probability score (E-value), where the score reflects the probability that a particular alignment occurs by chance (the lower the E-value, the more significant the hit). In addition to E-values, comparisons were also scored by percentage identity. Percentage identity refers to the number of identical nucleotides (or amino acids) between the two compared nucleic acid (or polypeptide) sequences over a particular length. In some instances, the default parameters may be adjusted to modify the stringency of the search.

[0439] Table 14 provides a list of nucleic acid and protein sequences related to the nucleic acid sequence as represented by SEQ ID NO: 131 and the protein sequence represented by SEQ ID NO: 132.

TABLE 14
Nucleic acid sequences encoding AP2-2 polypeptides and
AP2-2 polypeptides.

| | | Nucleic | |
|---|---|---|---|
| | | acid | |
| | | SEQ ID | Poly-peptide |
| Name/identifier | Source organism | NO: | SEQ ID NO: |
| AP2-EREBP | Oryza sativa | 131 | 132 |
| Os07g47790 | Oryza sativa | 139 | 140 |
| AAX13280 | Triticum aestivum | 141 | 142 |
| Os01g21120 | Oryza sativa | 143 | 144 |
| Os03g08470 | Oryza sativa | 145 | 146 |
| CAD56466 | Triticum aestivum | 147 | 148 |
| AT2G47520.1 | Arabidopsis thaliana | 149 | 150 |
| Os02g54160 | Oryza sativa | 151 | 152 |
| Os09g26420 | Oryza sativa | 153 | 154 |
| AAP32468 | Triticum aestivum | 155 | 156 |
| AAP32467 | Triticum aestivum | 157 | 158 |
| AT1G53910.1 | Arabidopsis thaliana | 159 | 160 |
| AAM65746 | Arabidopsis thaliana | 161 | 162 |
| AT3G14230.1 | Arabidopsis thaliana | 163 | 164 |
| AT3G14230.2 | Arabidopsis thaliana | 165 | 166 |
| AT3G14230.3 | Arabidopsis thaliana | 167 | 168 |
| AT3G16770 | Arabidopsis thaliana | 169 | 170 |
| Os07g42510 | Oryza sativa | 171 | 172 |
| Os03g08490 | Oryza sativa | 173 | 174 |
| Os03g08500 | Oryza sativa | 175 | 176 |
| AT1G72360 | Arabidopsis thaliana | 177 | 178 |
| Os03g08460 | Oryza sativa | 179 | 180 |
| Os05g29810 | Oryza sativa | 181 | 182 |
| Os03g22170 | Oryza sativa | 183 | 184 |
| Os10g25170 | Oryza sativa | 185 | 186 |
| Os09g11460 | Oryza sativa | 187 | 188 |
| AAK95687 | Lycopersicon esculentum | 189 | 190 |
| Os09g11480 | Oryza sativa | 191 | 192 |
| AAQ91334 | Lycopersicon esculentum | 193 | 194 |
| AAR87866 | Lycopersicon esculentum | 195 | 196 |
| AT1G80580 | Arabidopsis thaliana | 197 | 198 |
| AAP40022 | Nicotiana tabacum | 199 | 200 |
| CAE54591 | Fagus sylvatica | 201 | 202 |
| CAD21849 | Fagus sylvatica | 203 | 204 |
| ABD65407 | Capsicum annuum | 205 | 206 |
| AAP72289 | Capsicum annuum | 207 | 208 |
| AAS20427 | Capsicum annuum | 209 | 210 |
| AAX07458 | Gossypium hirsutum | 211 | 212 |
| AAT77192 | Gossypium barbadense | 213 | 214 |
| AAX20013 | Gossypium hirsutum | 215 | 216 |
| AAX68526 | Gossypium hirsutum | 217 | 218 |
| AAX68525 | Gossypium hirsutum | 219 | 220 |
| AAT77191 | Gossypium barbadense | 221 | 222 |
| AAV51937 | Gossypium hirsutum | 223 | 224 |
| AAV85777 | Gossypium hirsutum | 225 | 226 |
| AAX07460 | Gossypium hirsutum | 227 | 228 |
| AAX84670 | Manihot esculenta | 229 | 230 |
| AAW33881 | Populus alba × Populus tremula | 231 | 232 |
| BAE71206 | Trifolium pratense | 233 | 234 |
| AAQ10777 | Glycine max | 235 | 236 |
| AAL67489 | Narcissus pseudonarcissus | 237 | 238 |
| CAA05084 | Arabidopsis thaliana | 239 | 240 |
| ABE84970 | Medicago truncatula | 241 | 242 |
| ABE80536 | Medicago truncatula | 243 | 244 |
| AAC29516 | Solanum tuberosum | 245 | 246 |
| BAC56862 | Solanum tuberosum | 247 | 248 |
| AAS01337 | Coffea canephora | 249 | 250 |
| AAZ14085 | Hordeum vulgare | 251 | 252 |
| BAD01556 | Cucumis melo | 253 | 254 |
| BAF43419 | Malus × domestica | 255 | 256 |

### Example 10

### Alignment of AP2-2 polypeptide Sequences

[0440] Alignment of polypeptide sequences was performed using the AlignX programme from the Vector NTI (Invitrogen) which is based on the popular Clustal algorithm of progressive alignment (Thompson et al. (1997) Nucleic Acids Res 25:4876-4882; Chenna et al. (2003). Nucleic Acids Res 31:3497-3500). Default values are for the gap open penalty of 10, for the gap extension penalty of 0,1 and the selected weight matrix is Blosum 62 (if polypeptides are aligned). Results in FIG. 7 show that AP2-2 polypeptides share regions of high sequence conservation. Motifs XII to XVII are underlined for Os06g09390 (SEQ ID NO: 132).

### Example 11

### Calculation of Global Percentage Identity Between Polypeptide Sequences Useful in Performing the Methods of the Invention

[0441] Global percentages of similarity and identity between full length polypeptide sequences useful in performing the methods of the invention were determined using one of the methods available in the art, the MatGAT (Matrix Global Alignment Tool) software (BMC Bioinformatics. 2003 4:29. MatGAT: an application that generates similarity/identity matrices using protein or DNA sequences. Campanella J J, Bitincka L, Smalley J; software hosted by Ledion Bitincka). MatGAT software generates similarity/identity matrices for DNA or protein sequences without needing pre-alignment of the data. The program performs a series of pair-wise alignments using the Myers and Miller global alignment algorithm (with a gap opening penalty of 12, and a gap extension penalty of 2), calculates similarity and identity using for example Blosum 62 (for polypeptides), and then places the results in a distance matrix. Sequence similarity is shown in the bottom half of the dividing line and sequence identity is shown in the top half of the diagonal dividing line.

[0442] Parameters used in the comparison were:
[0443] Scoring matrix: Blosum62
[0444] First Gap: 12
[0445] Extending gap: 2

[0446] Results of the software analysis are shown in Table 15 for the global similarity and identity over the full length of the polypeptide sequences (excluding the partial polypeptide sequences). Percentage identity is given above the diagonal and percentage similarity is given below the diagonal.

[0447] The percentage identity between the full length polypeptide sequences useful in performing the methods of the invention can be as low as 20% amino acid identity compared to SEQ ID NO: 132. The sequence identity will be higher when specific domains, such as the AP2 domain are compared.

TABLE 15
MatGAT results for global similarity and identity over the full length of the polypeptide
sequences.

| | | 1 | 2 | 3 | 4 | 5 | 6 | 7 | 8 | 9 | 10 | 11 | 12 | 13 | 14 | 15 |
|---|---|---|---|---|---|---|---|---|---|---|---|---|---|---|---|---|
| 1. | SEQID 132 | | 27.7 | 63.3 | 29.8 | 38.3 | 62.4 | 24 | 59.5 | 40.8 | 61.1 | 58.2 | 37.2 | 37.2 | 37.1 | 37 |
| 2. | SEQID 140 | 37.8 | | 27.2 | 43.9 | 29.7 | 26.6 | 36.4 | 27.5 | 26.5 | 26.2 | 25.7 | 29.1 | 29.1 | 27.4 | 27.7 |
| 3. | SEQID 142 | 76.5 | 35.8 | | 29.9 | 33.1 | 90.8 | 24.5 | 55.9 | 39 | 94.6 | 88.5 | 35.9 | 35.9 | 36.7 | 37.3 |
| 4. | SEQID 144 | 37.6 | 55.6 | 35.5 | | 31.1 | 30.3 | 41.1 | 27.6 | 25 | 28.7 | 29.2 | 27.7 | 27.9 | 27.2 | 27.5 |
| 5. | SEQID 146 | 50.6 | 37.7 | 48.2 | 39.5 | | 32 | 24.9 | 36.1 | 33.2 | 30.7 | 30.2 | 34.3 | 34.3 | 32.1 | 32.4 |
| 6. | SEQID 148 | 74.9 | 35.2 | 94.4 | 35.2 | 47 | | 25.2 | 56.5 | 38.6 | 87.4 | 88 | 36.2 | 36.2 | 37.6 | 37.9 |
| 7. | SEQID 150 | 31.8 | 48.1 | 32.1 | 52.7 | 34.1 | 32.1 | | 23.6 | 22.2 | 23.9 | 24.7 | 26.3 | 26.3 | 24.8 | 25.3 |
| 8. | SEQID 152 | 74.8 | 35.1 | 69.9 | 34.2 | 47.1 | 69 | 31.2 | | 42.7 | 53.5 | 53.6 | 39.9 | 39.9 | 36.1 | 36.3 |
| 9. | SEQID 154 | 54 | 33.6 | 51.5 | 32.6 | 45.7 | 51 | 28 | 56.1 | | 37.3 | 36.1 | 36.8 | 36.8 | 35 | 35.3 |
| 10. | SEQID 156 | 73.2 | 33.8 | 96.1 | 34.6 | 46.5 | 91.3 | 31.5 | 67.1 | 50 | | 85.1 | 34.8 | 35.1 | 35.9 | 36.3 |
| 11. | SEQID 158 | 70.7 | 34.6 | 89.9 | 36.1 | 45.8 | 90 | 34 | 66.6 | 48 | 86.8 | | 32.5 | 32.5 | 34 | 34.4 |
| 12. | SEQID 160 | 53.3 | 38.5 | 54.2 | 35.8 | 48 | 52.5 | 33 | 53.7 | 50 | 53.6 | 49.2 | | 99.4 | 62.2 | 62.8 |
| 13. | SEQID 162 | 53.3 | 38.5 | 54.2 | 35.8 | 48 | 52.5 | 33 | 53.7 | 50 | 53.6 | 49.2 | 100 | | 62.2 | 62.8 |
| 14. | SEQID 164 | 56.7 | 34.3 | 54.4 | 33.5 | 47.2 | 54.6 | 29.6 | 55.4 | 49.7 | 54.1 | 50.1 | 70.7 | 71 | | 98.9 |
| 15. | SEQID 166 | 57.1 | 34.7 | 54.7 | 33.9 | 47.7 | 54.9 | 30.4 | 55.7 | 49.7 | 54.7 | 50.7 | 71.7 | 72 | 98.9 | |
| 16. | SEQID 168 | 57.2 | 34.8 | 54.8 | 34 | 47.9 | 55.1 | 30.2 | 55.6 | 51 | 54.8 | 50.8 | 71.9 | 72.2 | 98.7 | 99.7 |
| 17. | SEQID 170 | 41.2 | 47.2 | 38.9 | 46.4 | 41.3 | 38.4 | 46.8 | 38.6 | 36.9 | 37.5 | 38.3 | 40.8 | 40.8 | 39.6 | 40 |
| 18. | SEQID 172 | 51.9 | 34.8 | 52.1 | 38.9 | 52 | 54.4 | 32.2 | 50.4 | 43.9 | 49.9 | 52.9 | 46.6 | 46.6 | 44.3 | 43.7 |
| 19. | SEQID 174 | 46.4 | 34.9 | 43.4 | 40.8 | 51.2 | 46.7 | 31.5 | 48.2 | 40.9 | 42.8 | 44 | 43.3 | 43.6 | 42.2 | 42.7 |
| 20. | SEQID 176 | 50 | 38.6 | 49.6 | 40.1 | 52.7 | 49 | 32.8 | 48.2 | 44.7 | 47.6 | 45.5 | 48 | 48 | 44.6 | 45.1 |
| 21. | SEQID 178 | 41.7 | 46.9 | 44.5 | 47.7 | 47 | 45 | 44.3 | 42.5 | 39.6 | 42.5 | 44.6 | 45 | 45.3 | 39.6 | 40.3 |
| 22. | SEQID 180 | 47.5 | 36.5 | 40.8 | 35.9 | 44.9 | 42.1 | 32.8 | 44.1 | 38.1 | 39.4 | 42.8 | 46.6 | 46.6 | 42.7 | 42.4 |
| 23. | SEQID 182 | 32.3 | 50 | 32.7 | 50.7 | 36.8 | 33.2 | 47 | 32.1 | 31.1 | 31.5 | 32.2 | 31.8 | 31.8 | 32.5 | 32.8 |
| 24. | SEQID 184 | 39 | 55.1 | 37.2 | 53.5 | 43.1 | 39.8 | 44.9 | 37.3 | 36.9 | 36.6 | 39.8 | 36.3 | 36.3 | 34.3 | 34.7 |
| 25. | SEQID 186 | 40.6 | 35.7 | 42 | 41.3 | 50.6 | 42.1 | 32 | 44.4 | 42.7 | 42.5 | 40.7 | 39.7 | 39.7 | 40.1 | 39.5 |
| 26. | SEQID 188 | 31.8 | 37.9 | 34.1 | 41.4 | 39.2 | 33.8 | 38.4 | 32.1 | 33.1 | 33 | 35.8 | 34.1 | 34.1 | 33 | 33.6 |
| 27. | SEQID 190 | 60.2 | 34.1 | 59.1 | 36.8 | 48.1 | 59.4 | 33.6 | 58.9 | 54.3 | 57.5 | 54.6 | 59.7 | 59.7 | 60.7 | 61.3 |
| 28. | SEQID 192 | 39.5 | 41.2 | 38 | 42 | 38.6 | 39.8 | 38 | 38.9 | 37.4 | 36.9 | 39.5 | 39.4 | 39.4 | 38 | 39.5 |
| 29. | SEQID 194 | 53.9 | 37 | 54.6 | 38.2 | 47.9 | 55.3 | 34.9 | 50.1 | 46.7 | 53.2 | 53.6 | 57.5 | 57.5 | 58.3 | 57.6 |
| 30. | SEQID 196 | 44.2 | 48.8 | 44.5 | 51.2 | 41.3 | 43.8 | 49.2 | 40.5 | 37.6 | 41.4 | 41.9 | 39.1 | 39.1 | 41.2 | 40 |
| 31. | SEQID 198 | 29.6 | 35.5 | 33.5 | 34 | 33.2 | 32.7 | 32 | 32.3 | 29.5 | 34.1 | 35.2 | 33.8 | 33.8 | 31.1 | 31.5 |
| 32. | SEQID 200 | 56.6 | 32.8 | 55.6 | 37 | 49.9 | 55.3 | 33.3 | 56.1 | 52.3 | 54 | 51.4 | 61.5 | 61.5 | 62.8 | 62.8 |
| 33. | SEQID 202 | 56.6 | 34.9 | 57.4 | 37.6 | 49.7 | 57.9 | 31 | 60.8 | 56.8 | 55.3 | 53.4 | 63.8 | 64 | 64.1 | 64.3 |
| 34. | SEQID 204 | 56.5 | 34.1 | 57.6 | 37.6 | 49.3 | 57.6 | 30.7 | 60.5 | 55.1 | 56.3 | 53.3 | 62.7 | 62.9 | 62.8 | 63.5 |
| 35. | SEQID 206 | 60 | 34.1 | 57.9 | 36.5 | 50.4 | 58.9 | 32.5 | 57.6 | 52.5 | 56.5 | 53.3 | 59.5 | 59.5 | 59.6 | 60.3 |
| 36. | SEQID 208 | 59.1 | 32.8 | 56.6 | 35.2 | 49.3 | 57.7 | 32 | 56.6 | 51.3 | 55.3 | 52 | 58.5 | 58.5 | 58.6 | 59.2 |
| 37. | SEQID 210 | 44.2 | 48.5 | 43.4 | 52.3 | 42.8 | 43.3 | 45.8 | 42.7 | 39.6 | 40.8 | 42.5 | 43.6 | 43.6 | 41.7 | 41.3 |
| 38. | SEQID 212 | 55.4 | 34.9 | 51.8 | 34.6 | 50 | 53.3 | 33.1 | 57.4 | 57.6 | 50 | 47.7 | 64.6 | 64.9 | 65.6 | 65.4 |
| 39. | SEQID 214 | 50.3 | 37 | 49.6 | 38.6 | 46.1 | 51.3 | 37 | 48.8 | 44.9 | 47.3 | 52.1 | 54.2 | 54.5 | 53.6 | 54.1 |
| 40. | SEQID 216 | 53.5 | 30.8 | 50.8 | 34.1 | 49 | 51.8 | 33.1 | 52 8 | 55.6 | 49.2 | 48.2 | 59.8 | 60.1 | 59.8 | 59.6 |
| 41. | SEQID 218 | 39 | 43.3 | 40 | 45.6 | 41.6 | 37.2 | 42.1 | 40 | 37.9 | 37.7 | 41 | 39.9 | 39.7 | 39.3 | 38.4 |
| 42. | SEQID 220 | 38.7 | 45.3 | 42 | 47.3 | 42.5 | 40.4 | 46.5 | 37.5 | 40.7 | 37.2 | 40.4 | 40.5 | 40.5 | 40.4 | 40 |
| 43. | SEQID 222 | 32.6 | 47.7 | 32.7 | 49.3 | 35.3 | 33 | 51.5 | 32.9 | 31.3 | 30.4 | 31.3 | 33.2 | 33.2 | 33.5 | 34.7 |
| 44. | SEQID 224 | 39.2 | 45.9 | 40.8 | 45.1 | 40.4 | 39.5 | 45.9 | 38.9 | 39.4 | 39.4 | 37.7 | 41.1 | 41.1 | 38.8 | 38.9 |
| 45. | SEQID 228 | 40.6 | 43.5 | 39.4 | 45.4 | 41.9 | 40.1 | 42.4 | 40.8 | 38.9 | 37.5 | 39.8 | 39.1 | 39.1 | 39.8 | 40.5 |
| 46. | SEQID 230 | 58 | 34.1 | 53.5 | 38.1 | 48 | 57 | 32 | 59.3 | 59.3 | 51.7 | 53.5 | 64.8 | 64.8 | 64.6 | 64.6 |
| 47. | SEQID 232 | 56.6 | 33.9 | 51.3 | 36.1 | 47.4 | 51.6 | 31.8 | 56.1 | 53.8 | 52.1 | 49.2 | 60.3 | 60 | 61.3 | 61.1 |
| 48. | SEQID 234 | 56.9 | 35.1 | 52.7 | 35.3 | 48.1 | 53.2 | 31.7 | 53.8 | 54.5 | 50.9 | 50.6 | 57.4 | 57.4 | 61 | 61.3 |
| 49. | SEQID 236 | 55.7 | 35.2 | 52.9 | 35.4 | 45.8 | 53.1 | 33.3 | 57 | 56.8 | 49.7 | 50.8 | 55.7 | 56 | 59.4 | 59.1 |
| 50. | SEQID 240 | 40.6 | 46.3 | 42.5 | 47.2 | 40.4 | 41.3 | 46.3 | 39.5 | 36.9 | 39.4 | 41.3 | 39.7 | 39.7 | 39.8 | 40.3 |
| 51. | SEQID 242 | 42.5 | 40.7 | 44.8 | 43.9 | 40.7 | 44.7 | 43 | 42.2 | 37.6 | 43.1 | 43.4 | 44.1 | 44.1 | 43 | 43.7 |
| 52. | SEQID 244 | 33.4 | 40.8 | 29.6 | 38.3 | 32.9 | 32.1 | 41.7 | 32.9 | 27.8 | 28.7 | 31.9 | 35.2 | 35.5 | 32.5 | 32.8 |
| 53. | SEQID 246 | 46.1 | 42.6 | 41.4 | 47.3 | 42.8 | 41.3 | 41.6 | 41.6 | 39.4 | 41.7 | 40.4 | 41.6 | 41.1 | 40.6 | 40.8 |
| 54. | SEQID 248 | 42.3 | 46.6 | 40.6 | 45.1 | 42.2 | 40.7 | 43.6 | 37.8 | 37.9 | 39.2 | 39.8 | 42.2 | 42.2 | 41.2 | 41.1 |
| 55. | SEQID 250 | 43.4 | 40.1 | 44.8 | 43.2 | 48.5 | 45.6 | 37.7 | 45.5 | 42.7 | 43.7 | 44.3 | 43 | 43 | 42.5 | 42.9 |
| 56. | SEQID 252 | 46.7 | 38.4 | 47.3 | 39.6 | 60.5 | 47.9 | 34.1 | 47.9 | 42.4 | 45.9 | 48.5 | 44.7 | 45.8 | 42.5 | 42.9 |
| 57. | SEQID 254 | 43.4 | 49.5 | 44.2 | 51.6 | 44.9 | 43.8 | 46.2 | 40.5 | 40.2 | 42.5 | 44 | 43 | 43 | 40.1 | 40 |
| 58. | SEQID 256 | 36.2 | 44.8 | 38.3 | 45.6 | 40.4 | 39.5 | 45.2 | 36.4 | 36.6 | 36.3 | 38.9 | 38.3 | 38.3 | 38 | 38.7 |
| | | 16 | 17 | 18 | 19 | 20 | 21 | 22 | 23 | 24 | 25 | 26 | 27 | 28 | 29 | 30 |
| 1. | SEQID 132 | 37.6 | 29.6 | 38.3 | 30.1 | 34 | 26.5 | 29.6 | 26 | 27.2 | 27.9 | 23.7 | 41.4 | 27.7 | 38.4 | 32.2 |
| 2. | SEQID 140 | 27.8 | 34.1 | 28.7 | 27.7 | 27.6 | 34.1 | 26.1 | 40.3 | 45.8 | 28.5 | 26.6 | 26.9 | 32.5 | 28.7 | 36.7 |
| 3. | SEQID 142 | 37.4 | 28.5 | 35.2 | 30.7 | 32.4 | 29.1 | 26.6 | 25.8 | 28.2 | 27.8 | 23.5 | 40.1 | 25.3 | 36.7 | 32.8 |
| 4. | SEQID 144 | 27.5 | 35.9 | 30.6 | 32 | 31.3 | 33 | 29.8 | 41.6 | 39.3 | 31.4 | 28.8 | 29.4 | 30.2 | 31.2 | 43.5 |
| 5. | SEQID 146 | 32.5 | 29.3 | 36.3 | 35.7 | 37.5 | 29.5 | 30.2 | 27.5 | 30.3 | 35.9 | 27.6 | 35.4 | 29.7 | 35.4 | 30.3 |
| 6. | SEQID 148 | 38 | 28.4 | 36.9 | 31.6 | 32 | 30.3 | 26.9 | 26.9 | 28.7 | 29.3 | 23.5 | 40.9 | 26.5 | 38 | 33.3 |
| 7. | SEQID 150 | 25.7 | 33.3 | 25.1 | 24 | 24.6 | 31.7 | 21.8 | 36.7 | 31 | 24.2 | 26.9 | 28 | 28 | 25.4 | 38.1 |
| 8. | SEQID 152 | 36.4 | 28.3 | 37.2 | 32 | 31.6 | 30.1 | 27.9 | 25.8 | 28.6 | 32.2 | 23.4 | 42 | 28.7 | 37.5 | 31.1 |
| 9. | SEQID 154 | 35.7 | 25.3 | 31.7 | 30.1 | 31 | 26.2 | 23.8 | 24.7 | 28.8 | 28.1 | 23.6 | 37.8 | 26.2 | 33.6 | 27.5 |
| 10. | SEQID 156 | 36.4 | 27.3 | 33.2 | 30.2 | 31.4 | 27.7 | 24.6 | 24.7 | 24.5 | 26.2 | 22.4 | 39 | 24.2 | 35.3 | 30.5 |
| 11. | SEQID 158 | 34.5 | 28 | 33.7 | 29.3 | 28.3 | 29.1 | 25.3 | 25.8 | 27.8 | 26.6 | 23.6 | 37.1 | 25.9 | 34.9 | 30.1 |
| 12. | SEQID 160 | 63 | 28.5 | 32.4 | 28 | 30.2 | 31.3 | 27.3 | 24.9 | 25.7 | 27.2 | 24.9 | 43.4 | 29.1 | 42.9 | 28.9 |
| 13. | SEQID 162 | 63 | 28.5 | 32.4 | 28.2 | 30.2 | 31 | 27.3 | 24.9 | 25.7 | 27.2 | 24.7 | 43.7 | 29.1 | 42.9 | 28.9 |
| 14. | SEQID 164 | 98.7 | 29.3 | 32.6 | 27.9 | 29.9 | 27.7 | 26.1 | 24.5 | 26.3 | 27.1 | 24.1 | 42.5 | 27.9 | 44 | 29.1 |
| 15. | SEQID 166 | 99.7 | 29.6 | 31.9 | 28.2 | 30.2 | 28.3 | 26.4 | 24.8 | 26.6 | 27.9 | 24.9 | 42.9 | 29.6 | 43.9 | 28.3 |
| 16. | SEQID 168 | | 29.7 | 31.9 | 28.3 | 30.3 | 28.1 | 26.7 | 24.9 | 26.7 | 28.5 | 23.9 | 43 | 29.4 | 44.8 | 29.5 |
| 17. | SEQID 170 | 40.1 | | 30.7 | 29.6 | 29.3 | 31.6 | 24.8 | 36.1 | 35.6 | 28.5 | 26.5 | 28.9 | 30.4 | 31.6 | 34.9 |
| 18. | SEQID 172 | 43.6 | 40.6 | | 31.4 | 32.6 | 30.1 | 28.3 | 28.8 | 28.5 | 32.5 | 24.4 | 33.8 | 26.4 | 32.5 | 28.1 |
| 19. | SEQID 174 | 42.8 | 42.7 | 46.2 | | 47.1 | 30.5 | 30.9 | 30.5 | 28.9 | 35.3 | 24.5 | 29.3 | 28.8 | 27.4 | 28.7 |
| 20. | SEQID 176 | 45.2 | 41.3 | 50.3 | 59.3 | | 28.9 | 30.3 | 27.9 | 29.2 | 34.3 | 24.6 | 29.8 | 28.5 | 29.9 | 29.7 |
| 21. | SEQID 178 | 40.1 | 45 | 45.6 | 44.5 | 45.9 | | 27 | 30.2 | 28.6 | 26.1 | 27.9 | 31.4 | 28.4 | 31.2 | 33.7 |
| 22. | SEQID 180 | 42.8 | 38 | 42.1 | 47.2 | 47.1 | 41.4 | | 25.8 | 25 | 26.5 | 26.1 | 28 | 27.5 | 30 | 24.7 |
| 23. | SEQID 182 | 32.9 | 46.8 | 39.2 | 38 | 37.7 | 42.7 | 35 | | 37.4 | 27.6 | 28.6 | 23.9 | 33.5 | 26.6 | 31.3 |
| 24. | SEQID 184 | 34.5 | 48.8 | 38.6 | 40.5 | 38.6 | 43.1 | 37.1 | 44.4 | | 30.6 | 27.2 | 24.6 | 30.6 | 28.3 | 35.4 |
| 25. | SEQID 186 | 39.6 | 40.7 | 45 | 51.2 | 50.2 | 39.8 | 38 | 33.9 | 37.9 | | 26.9 | 29.2 | 28.5 | 27.3 | 26.6 |
| 26. | SEQID 188 | 33.7 | 44 | 33 | 37.4 | 36.8 | 41.6 | 35.3 | 37.9 | 39.5 | 39.8 | | 23.3 | 41.3 | 25.7 | 25.2 |
| 27. | SEQID 190 | 61.5 | 39.2 | 49.7 | 44.9 | 45.2 | 46.2 | 45.4 | 32.5 | 34.7 | 43 | 33.9 | | 27.1 | 52.8 | 32.8 |
| 28. | SEQID 192 | 39.6 | 43.2 | 37.1 | 39.9 | 39.8 | 47.7 | 41.4 | 40.8 | 43.6 | 37.6 | 56.4 | 37.4 | | 29.5 | 26.5 |
| 29. | SEQID 194 | 59.1 | 42.2 | 45.3 | 47.1 | 46.5 | 45.3 | 45 | 36.4 | 38.8 | 43.1 | 37 | 66.9 | 41.9 | | 31 |
| 30. | SEQID 196 | 41.4 | 51.2 | 39.8 | 41.4 | 42.2 | 53.1 | 39.6 | 41.5 | 50.8 | 38.2 | 42.7 | 45.4 | 44.6 | 43.4 | |
| 31. | SEQID 198 | 31.6 | 43.8 | 33.9 | 35.2 | 30.4 | 42 | 34 | 36.3 | 40.6 | 33.5 | 39.5 | 34.4 | 41 | 32.1 | 41.5 |
| 32. | SEQID 200 | 62 | 40.8 | 47.8 | 41.3 | 44.4 | 44.2 | 45 | 32.6 | 32.6 | 40.3 | 33.9 | 80.4 | 37.5 | 73.9 | 42.4 |
| 33. | SEQID 202 | 64.3 | 38.4 | 47.9 | 45.8 | 47.9 | 44.7 | 46.6 | 32.5 | 36.8 | 41.3 | 35.2 | 71.7 | 35.2 | 62.2 | 44.7 |
| 34. | SEQID 204 | 63.5 | 38.1 | 48.3 | 45.6 | 47.5 | 43.5 | 45.9 | 31.7 | 36 | 41.1 | 33.6 | 71.7 | 35.7 | 61.3 | 45.1 |
| 35. | SEQID 206 | 60.3 | 41.9 | 50.7 | 44 | 46.4 | 45.1 | 44.8 | 33.9 | 36 | 39.7 | 36.3 | 90.7 | 38.4 | 66.7 | 46.1 |
| 36. | SEQID 208 | 59.4 | 41.7 | 49.6 | 43.9 | 47.4 | 45.5 | 46.1 | 34.4 | 36.3 | 40.1 | 36.6 | 89.2 | 38.8 | 67.8 | 46.1 |
| 37. | SEQID 210 | 42.2 | 55.7 | 43 | 43.6 | 43.2 | 50.8 | 40.5 | 41.3 | 51.1 | 37.9 | 40.5 | 45.7 | 46.2 | 43.4 | 81.4 |
| 38. | SEQID 212 | 65.9 | 40.3 | 47.4 | 43.1 | 45.9 | 43.6 | 43.1 | 33.3 | 33.8 | 41.3 | 33.3 | 67.2 | 35.4 | 57.4 | 44.4 |
| 39. | SEQID 214 | 54.3 | 40.8 | 44.7 | 43.9 | 44.1 | 47.6 | 41.1 | 34.5 | 37 | 41.9 | 32.9 | 58.9 | 36.7 | 53.5 | 48.6 |
| 40. | SEQID 216 | 59.8 | 35.6 | 49.2 | 43.4 | 45.7 | 42.7 | 42.2 | 30.3 | 32.6 | 39.9 | 33.1 | 63.9 | 35.9 | 55.1 | 41.4 |
| 41. | SEQID 218 | 38.2 | 62.5 | 39.2 | 39.9 | 41.6 | 50.8 | 44.5 | 44.4 | 40.6 | 37.9 | 41.8 | 40.1 | 42.5 | 44.3 | 50.6 |
| 42. | SEQID 220 | 40.6 | 59.4 | 38 | 38.6 | 40.1 | 48.1 | 40.5 | 47.3 | 45.3 | 38.5 | 44.1 | 38.4 | 43 | 43.4 | 50.8 |
| 43. | SEQID 222 | 34.5 | 50.8 | 32.5 | 30.8 | 35 | 42.7 | 35.9 | 51 | 40.7 | 34.5 | 44.4 | 32.5 | 41.2 | 38.5 | 41.9 |
| 44. | SEQID 224 | 38.8 | 60.4 | 38 | 39.6 | 40.4 | 47.3 | 41.4 | 45.9 | 45.9 | 38.2 | 42 | 38.2 | 43.9 | 42.5 | 50 |
| 45. | SEQID 228 | 40.4 | 62.6 | 40.1 | 39.6 | 41.3 | 50.4 | 42.3 | 44.3 | 42 | 39.8 | 43.5 | 41.1 | 42.7 | 45 | 51.1 |
| 46. | SEQID 230 | 64.3 | 39.9 | 50.4 | 45.1 | 46.5 | 45.9 | 44.4 | 33.3 | 34.9 | 42 | 36 | 69.3 | 36.2 | 61.2 | 43.6 |
| 47. | SEQID 232 | 61.8 | 39.2 | 46.3 | 40.8 | 43.4 | 43.7 | 43.4 | 31.3 | 35.8 | 38.4 | 32.6 | 67.4 | 36.8 | 56.8 | 42.1 |
| 48. | SEQID 234 | 61.3 | 39 | 43.9 | 42.3 | 47 | 44.2 | 47.3 | 32.5 | 36.1 | 39 | 33 | 63.4 | 37.7 | 54.3 | 42.3 |
| 49. | SEQID 236 | 59.4 | 39.6 | 45.6 | 44.5 | 46.9 | 43.2 | 41.9 | 33.3 | 37 | 39.1 | 33.6 | 63.5 | 35.4 | 53.1 | 41.9 |
| 50. | SEQID 240 | 40.4 | 94.4 | 39.8 | 40.2 | 42.9 | 44.7 | 40.5 | 45.9 | 50 | 37.6 | 43.1 | 41.1 | 42 | 43.4 | 51.9 |
| 51. | SEQID 242 | 43.6 | 47.2 | 43.6 | 42.1 | 41.3 | 44.9 | 43.3 | 37.4 | 42.3 | 37.9 | 34.1 | 48.4 | 39 | 48.3 | 58 |
| 52. | SEQID 244 | 31.8 | 47.6 | 29.5 | 33.3 | 33.1 | 45 | 33.1 | 35.4 | 39.1 | 32.3 | 42.9 | 33.6 | 39.6 | 36.4 | 41.2 |
| 53. | SEQID 246 | 41.2 | 46 | 41.8 | 41.7 | 41.9 | 47.7 | 44.5 | 35.2 | 43.6 | 37.6 | 37.6 | 48.4 | 41.6 | 45 | 81.2 |
| 54. | SEQID 248 | 40.4 | 62.1 | 43 | 39.6 | 42.2 | 51.1 | 43.6 | 46.2 | 47 | 41.3 | 42.4 | 41.9 | 47 | 47.1 | 53.8 |
| 55. | SEQID 250 | 43 | 45.9 | 47.4 | 45.3 | 45 | 42.6 | 44.4 | 37.7 | 43.8 | 44.7 | 35.6 | 50.5 | 40.4 | 48 | 55.3 |
| 56. | SEQID 252 | 43.9 | 40.9 | 47.7 | 45.4 | 51.4 | 46 | 43.9 | 36.6 | 40.2 | 45.7 | 35.4 | 46.8 | 39.9 | 46.6 | 41.8 |
| 57. | SEQID 154 | 40.4 | 55.7 | 41.8 | 44.2 | 43.2 | 52 | 41.1 | 41 | 46.9 | 38.2 | 38.5 | 45.2 | 42.9 | 42.8 | 63.7 |
| 58. | SEQID 156 | 39.3 | 58.3 | 37.4 | 38.6 | 41.3 | 46.2 | 40.8 | 44 | 46 | 40.4 | 40.9 | 36.8 | 42.5 | 42.8 | 50 |
| | | 31 | 32 | 33 | 34 | 35 | 36 | 37 | 38 | 39 | 40 | 41 | 42 | 43 | 44 | 45 |
| 1. | SEQID 132 | 20.3 | 41.3 | 41.2 | 41 | 40.3 | 39.4 | 31.4 | 42 | 34.5 | 38.4 | 26.8 | 29.5 | 24.2 | 28.2 | 27 |
| 2. | SEQID 140 | 24 | 25.8 | 27 | 26.4 | 25.1 | 26.3 | 36.6 | 26.9 | 26.8 | 25.5 | 33.1 | 33.3 | 35.4 | 33.1 | 33.7 |
| 3. | SEQID 142 | 21.5 | 40.3 | 41.2 | 40.5 | 38.7 | 37 | 29.9 | 38.4 | 34.3 | 35.7 | 26.3 | 28 | 24 | 27.9 | 26.2 |
| 4. | SEQID 144 | 24.1 | 30.1 | 30.4 | 30.2 | 28.9 | 28.5 | 42.8 | 27.8 | 29.4 | 27.3 | 34.2 | 37.5 | 33.9 | 37 | 34.8 |
| 5. | SEQID 146 | 21.5 | 36.8 | 34.5 | 33.8 | 36.9 | 36.2 | 29.7 | 35 | 29.4 | 34.9 | 29.3 | 29.1 | 25.1 | 28.3 | 27.8 |
| 6. | SEQID 148 | 21.2 | 41.3 | 43.1 | 42 | 40.6 | 38.9 | 31.2 | 39.9 | 35.6 | 37.2 | 27.4 | 27.8 | 24.4 | 27.7 | 27.2 |
| 7. | SEQID 150 | 23 | 26.9 | 26.1 | 25.8 | 26.7 | 26.3 | 39.4 | 25.6 | 26.3 | 25.3 | 33.7 | 34.8 | 35.8 | 34.8 | 32.8 |
| 8. | SEQID 152 | 21 | 41.1 | 43 | 43 | 41.1 | 40.1 | 29.8 | 43.2 | 35.9 | 39.7 | 27 | 29.1 | 25.2 | 28 | 27.2 |
| 9. | SEQID 154 | 20.8 | 37.1 | 40 | 38.7 | 35.9 | 35.5 | 28.3 | 38.8 | 30.8 | 38.1 | 27.2 | 29.4 | 23.5 | 27.9 | 26.7 |
| 10. | SEQID 156 | 21.3 | 39.5 | 39.9 | 39.5 | 38.5 | 36.8 | 28 | 36.9 | 32.5 | 34.6 | 25.8 | 26.2 | 22.6 | 27.6 | 25.1 |
| 11. | SEQID 158 | 23.7 | 38.1 | 40 | 38.8 | 36.8 | 35.1 | 29.6 | 35.4 | 35.7 | 34.2 | 25.7 | 26.8 | 22.7 | 26.5 | 26.5 |
| 12. | SEQID 160 | 23.2 | 47.2 | 48.8 | 47.9 | 44.3 | 43.6 | 32.2 | 52.1 | 39.1 | 46.6 | 28.4 | 30.7 | 25.4 | 30.1 | 28.4 |
| 13. | SEQID 162 | 23.2 | 46.9 | 48.8 | 47.6 | 44.1 | 43.3 | 32.2 | 52.1 | 39.1 | 46.6 | 28.4 | 30.9 | 25.4 | 30.4 | 28.4 |
| 14. | SEQID 164 | 21.8 | 45.8 | 47 | 45.3 | 43.9 | 43.9 | 29.8 | 50.9 | 38.2 | 45.8 | 28.5 | 30.3 | 24.8 | 30 | 29 |
| 15. | SEQID 166 | 21.5 | 46 | 47.3 | 45.5 | 43.8 | 43.8 | 30.1 | 51.1 | 38.8 | 46 | 28 | 30.1 | 24.3 | 29.8 | 28.3 |
| 16. | SEQID 168 | 21.3 | 45.9 | 47.6 | 45.9 | 44.4 | 44.4 | 30.2 | 52.5 | 39.2 | 46.6 | 28.3 | 31 | 24.3 | 29.9 | 28.3 |
| 17. | SEQID 170 | 24.5 | 30.8 | 28.1 | 28.3 | 30.8 | 30.2 | 36.9 | 28.5 | 27.3 | 26.1 | 45 | 44.1 | 39.2 | 44.3 | 45.2 |
| 18. | SEQID 172 | 21.6 | 34.3 | 32.2 | 32.2 | 34 | 33.2 | 28.9 | 34.3 | 28.8 | 36.2 | 27 | 28.4 | 25.6 | 25.4 | 27.5 |
| 19. | SEQID 174 | 23.5 | 26.9 | 30.2 | 29.9 | 28.3 | 27.8 | 28.4 | 28 | 24.9 | 27.8 | 25 | 25.9 | 22 | 27.9 | 24.9 |
| 20. | SEQID 176 | 19 | 30.4 | 31.2 | 31.3 | 29.7 | 29.8 | 28.5 | 30.1 | 25.9 | 30.3 | 25.2 | 26.7 | 23.1 | 28 | 25.8 |
| 21. | SEQID 178 | 23.9 | 32.5 | 33.2 | 33.2 | 31.4 | 31.9 | 32.7 | 32 | 31.5 | 31.5 | 33.9 | 31 | 28.6 | 31.4 | 33.1 |
| 22. | SEQID 180 | 20.5 | 27.9 | 29.8 | 29.2 | 27.6 | 28.3 | 24.8 | 27.3 | 22.1 | 25.2 | 27.2 | 26.4 | 23 | 26.1 | 25.8 |
| 23. | SEQID 182 | 24.2 | 24 | 24.3 | 24.5 | 24.8 | 25.1 | 32 | 24.4 | 24.5 | 23.7 | 35.2 | 37.5 | 33.2 | 37.4 | 35.5 |
| 24. | SEQID 184 | 24.9 | 24.5 | 27.1 | 26.5 | 24.9 | 25.6 | 36 | 25.4 | 25.4 | 24.4 | 29.6 | 30.5 | 26.8 | 31 | 29.4 |
| 25. | SEQID 186 | 23.1 | 27.6 | 28 | 27.7 | 27.3 | 26.2 | 25.2 | 28.5 | 24.2 | 27.9 | 25.8 | 24.8 | 23.1 | 25.5 | 25.5 |
| 26. | SEQID 188 | 23.8 | 24.7 | 23.3 | 22 | 24.9 | 25.3 | 25.1 | 24.3 | 20.9 | 23.6 | 28.2 | 27.8 | 26.9 | 25.6 | 27 |
| 27. | SEQID 190 | 21 | 69.5 | 54.9 | 54.5 | 84.3 | 82.1 | 33.6 | 51.3 | 44.6 | 49.5 | 28.7 | 27.6 | 23.9 | 28.2 | 29 |
| 28. | SEQID 192 | 26.7 | 26.7 | 25.2 | 25.2 | 26.5 | 27.2 | 27.1 | 26.1 | 23.5 | 27 | 27.4 | 29.1 | 27.9 | 28.4 | 27 |
| 29. | SEQID 194 | 21.3 | 68.5 | 48.7 | 48.3 | 54.5 | 55.4 | 31.7 | 44.9 | 35.9 | 44.2 | 30.4 | 31.6 | 28.4 | 31.3 | 30.7 |
| 30. | SEQID 196 | 21.9 | 32.3 | 32.5 | 32.7 | 35.2 | 34 | 72.7 | 32.3 | 34.2 | 28.9 | 32.3 | 33.9 | 28.7 | 33 | 32.9 |
| 31. | SEQID 198 | | 20.9 | 18.9 | 18.8 | 20.2 | 20.5 | 23 | 22.1 | 21 | 20.9 | 24.3 | 24.4 | 26.5 | 24.9 | 25.3 |
| 32. | SEQID 200 | 31.5 | | 59.9 | 59.5 | 69.4 | 67.4 | 32.3 | 55.1 | 45.4 | 52.9 | 28.1 | 28.8 | 23.5 | 28.5 | 27.3 |
| 33. | SEQID 202 | 30.7 | 72.9 | | 96.3 | 56.1 | 55.1 | 33.2 | 66.1 | 54 | 58.6 | 30.5 | 28.5 | 24.1 | 28.9 | 30.7 |
| 34. | SEQID 204 | 30.7 | 71.8 | 97.1 | | 55.8 | 54.7 | 33.5 | 65.1 | 53 | 57.1 | 29.7 | 28.9 | 24.3 | 27.7 | 30.4 |
| 35. | SEQID 206 | 32 | 81.1 | 72.2 | 72 | | 97.3 | 34.4 | 53.5 | 45.8 | 49.5 | 28.8 | 28.9 | 25.3 | 27.2 | 28.8 |
| 36. | SEQID 208 | 32.8 | 79.1 | 70.6 | 70.4 | 97.9 | | 33.5 | 52.5 | 44.7 | 48 | 28.4 | 28.1 | 24.7 | 27.1 | 28.4 |
| 37. | SEQID 210 | 43.6 | 43.2 | 43.7 | 43.2 | 45.9 | 46.6 | | 32.1 | 32 | 30.6 | 35.8 | 36.5 | 32.5 | 32.4 | 36 |
| 38. | SEQID 212 | 31.8 | 69 | 79.7 | 78.7 | 68.7 | 67.4 | 42.8 | | 75.1 | 69.5 | 27.9 | 29 | 25.4 | 29.2 | 29.5 |
| 39. | SEQID 214 | 33.5 | 56.1 | 66.9 | 66.1 | 58.7 | 58.3 | 46.4 | 77.7 | | 52.9 | 25.4 | 26.9 | 23.4 | 25.9 | 26.7 |
| 40. | SEQID 216 | 32.3 | 64.9 | 72.5 | 70.7 | 63.9 | 61.6 | 40.9 | 83.1 | 64.4 | | 27 | 29.5 | 24 | 29.2 | 27.5 |
| 41. | SEQID 218 | 43.7 | 42.6 | 41.3 | 40 | 40.5 | 39.3 | 51.1 | 40.3 | 40.1 | 37.6 | | 62.8 | 65.8 | 61.9 | 95.8 |
| 42. | SEQID 220 | 41.8 | 40.6 | 37.8 | 38.1 | 41.1 | 39 | 54.5 | 36.9 | 39.2 | 36.4 | 74.3 | | 47.3 | 94.1 | 64.2 |
| 43. | SEQID 222 | 38.7 | 35.1 | 33.1 | 33.3 | 33.1 | 33.3 | 44.3 | 34.1 | 33.2 | 32.8 | 69 | 54.3 | | 46.5 | 68.8 |
| 44. | SEQID 224 | 40.6 | 40.3 | 39.4 | 38.1 | 36.8 | 37.4 | 49.2 | 37.9 | 38.9 | 36.9 | 72.8 | 96.9 | 54.1 | | 62.4 |
| 45. | SEQID 228 | 42.4 | 43.2 | 42.9 | 41.9 | 40.3 | 38.8 | 52.3 | 41.8 | 41.1 | 38.6 | 97.3 | 74.8 | 70.2 | 73.3 | |
| 46. | SEQID 230 | 31.5 | 72.1 | 79.5 | 76.9 | 70.1 | 68 | 44.4 | 77.7 | 65.1 | 70.5 | 39.6 | 39.1 | 34.4 | 36.5 | 40.9 |
| 47. | SEQID 232 | 30.5 | 68.2 | 74.5 | 72.9 | 68.2 | 66.3 | 42.4 | 74.1 | 62.6 | 65.4 | 38.4 | 40.5 | 31.6 | 38.9 | 40.5 |
| 48. | SEQID 234 | 28.8 | 65.6 | 68.3 | 66.5 | 63.4 | 61.3 | 43.9 | 65.9 | 54.5 | 64.4 | 39.7 | 41.6 | 33 | 38.7 | 39.7 |
| 49. | SEQID 236 | 28.6 | 63.8 | 69.8 | 67.2 | 65.4 | 63.5 | 44.5 | 70.3 | 57.8 | 64.6 | 40.4 | 40.1 | 34.4 | 39.6 | 41.9 |
| 50. | SEQID 240 | 42.6 | 39.5 | 38.4 | 38.7 | 42.4 | 42.3 | 54.5 | 37.2 | 40.4 | 36.4 | 61.3 | 58.2 | 52 | 60.8 | 63.4 |
| 51. | SEQID 242 | 36.1 | 47.3 | 45.5 | 45.3 | 46.7 | 46.6 | 59 | 46.9 | 46.7 | 43.4 | 45.6 | 45.9 | 37 | 45.2 | 45.6 |
| 52. | SEQID 244 | 40.2 | 32.6 | 31 | 31.2 | 33.9 | 33.9 | 42.8 | 31.5 | 35.1 | 31.1 | 42.9 | 43.8 | 40.8 | 42.4 | 40.8 |
| 53. | SEQID 246 | 39.3 | 42.9 | 44.4 | 44.5 | 47.5 | 47.4 | 75.5 | 46.7 | 51.4 | 42.9 | 43.3 | 47 | 37.9 | 46.3 | 45 |
| 54. | SEQID 248 | 40.2 | 42.9 | 40.2 | 39.5 | 41.3 | 40.7 | 55.3 | 40.3 | 44.2 | 37.4 | 56.1 | 62.1 | 49.2 | 61.4 | 58 |
| 55. | SEQID 250 | 34.3 | 46.8 | 45.2 | 46.9 | 46.9 | 46.3 | 55.6 | 46.7 | 47.4 | 43.4 | 43.2 | 43.8 | 34 | 41.9 | 42.6 |
| 56. | SEQID 252 | 36 | 43.7 | 45.8 | 43.2 | 45.1 | 45 | 40.9 | 41.5 | 43 | 43.4 | 38.7 | 39 | 29.9 | 39.9 | 36.6 |
| 57. | SEQID 254 | 39.9 | 42.9 | 45.5 | 45.1 | 46.1 | 45.5 | 64.1 | 44.4 | 47 | 43.2 | 48 | 49.1 | 38.5 | 48 | 48.7 |
| 58. | SEQID 256 | 41.8 | 39.3 | 41.3 | 41.3 | 37.3 | 37.4 | 51.9 | 40 | 39.8 | 38.1 | 62.5 | 66 | 50.4 | 67.5 | 61.1 |

| | | 46 | 47 | 48 | 49 | 50 | 51 | 52 | 53 | 54 | 55 | 56 | 57 | 58 |
|---|---|---|---|---|---|---|---|---|---|---|---|---|---|---|
| 1. | SEQID 132 | 41 | 41.4 | 40.8 | 41.6 | 28.6 | 29.8 | 21.5 | 33.4 | 27.9 | 32.1 | 33.3 | 31.5 | 26.6 |
| 2. | SEQID 140 | 28.1 | 27.1 | 26.8 | 27 | 36.4 | 31.3 | 26.8 | 31.8 | 36.4 | 31.1 | 28.4 | 37.8 | 33.2 |
| 3. | SEQID 142 | 38.8 | 38.3 | 38.6 | 36.2 | 30.3 | 30.5 | 20.2 | 27.2 | 29 | 30.2 | 31.3 | 32.4 | 26.8 |
| 4. | SEQID 144 | 31.3 | 28.4 | 29.2 | 31.1 | 35.1 | 33.7 | 23.5 | 37.8 | 34.6 | 35 | 30.5 | 43.8 | 36.2 |
| 5. | SEQID 146 | 34.8 | 34.4 | 35.8 | 34.5 | 27.8 | 30.4 | 21.5 | 28.1 | 28.1 | 31.9 | 49.7 | 31.5 | 29.6 |
| 6. | SEQID 148 | 43.4 | 39.7 | 39.8 | 37.9 | 29.5 | 32.2 | 21.5 | 29.4 | 28.9 | 30.3 | 31 | 34.5 | 26.7 |
| 7. | SEQID 150 | 26.2 | 25 | 24.9 | 25.3 | 33.2 | 33.7 | 29.1 | 34.1 | 35.1 | 31 | 25.5 | 37.7 | 35.7 |
| 8. | SEQID 152 | 45.3 | 42.4 | 40.8 | 39.5 | 28.3 | 30.4 | 22.1 | 28.6 | 28.1 | 30.7 | 35.7 | 31 | 25.4 |
| 9. | SEQID 154 | 43.1 | 37.4 | 36.8 | 39.7 | 26 | 27.8 | 19.8 | 27.1 | 27.3 | 30.6 | 30.2 | 28.7 | 27.8 |
| 10. | SEQID 156 | 39.2 | 37.9 | 37.5 | 34.5 | 28.7 | 27.7 | 19.9 | 27.4 | 27 | 29.1 | 28.8 | 30.8 | 26.8 |
| 11. | SEQID 158 | 40.9 | 37 | 38.6 | 37 | 29.5 | 29.8 | 21.1 | 27 | 27.4 | 29.2 | 31 | 32.9 | 26.5 |
| 12. | SEQID 160 | 49.3 | 46.3 | 44.8 | 44.4 | 28.3 | 30.8 | 24.1 | 29.9 | 29.7 | 29.3 | 31.1 | 32.2 | 27 |
| 13. | SEQID 162 | 49.3 | 46 | 45.1 | 44.4 | 28.3 | 30.8 | 24.4 | 29.1 | 30 | 29.3 | 31.6 | 32.5 | 27 |
| 14. | SEQID 164 | 46.6 | 42.3 | 43.2 | 42.6 | 29.7 | 31 | 22.6 | 28.3 | 29.2 | 29.9 | 30.6 | 29.8 | 28.8 |
| 15. | SEQID 166 | 47.1 | 42.7 | 43.6 | 42.8 | 30.1 | 31.8 | 21.8 | 28.8 | 29.3 | 30.2 | 30.8 | 29.6 | 28.8 |
| 16. | SEQID 168 | 46.7 | 42.7 | 44 | 43.1 | 30.1 | 31.4 | 21.7 | 28.6 | 28.8 | 30.3 | 31.9 | 30.2 | 28.6 |
| 17. | SEQID 170 | 30.2 | 29.1 | 29.1 | 28.4 | 90.8 | 32.5 | 29 | 34.3 | 41.2 | 31.4 | 27.5 | 35.4 | 42.8 |
| 18. | SEQID 172 | 34.9 | 31.7 | 31.5 | 33.5 | 29.8 | 28.7 | 19.5 | 26.9 | 29.7 | 31.5 | 36 | 30.1 | 27.9 |
| 19. | SEQID 174 | 31.1 | 28 | 28 | 30.8 | 29 | 28.3 | 21.1 | 26.9 | 29.4 | 28.8 | 32.4 | 25.5 | 28.6 |
| 20. | SEQID 176 | 31.6 | 29.9 | 32.2 | 33 | 28.7 | 26.5 | 22.5 | 28 | 25.5 | 27.1 | 35.9 | 30.8 | 27.7 |
| 21. | SEQID 178 | 35.5 | 33.3 | 31.4 | 32.2 | 31.2 | 28.9 | 26.6 | 30.1 | 31.4 | 29.3 | 30 | 35 | 30.6 |
| 22. | SEQID 180 | 28.2 | 26.4 | 29.6 | 29 | 26.7 | 27.1 | 19.6 | 24.1 | 25.7 | 24.1 | 27.4 | 26.8 | 27.5 |
| 23. | SEQID 182 | 24.1 | 24.5 | 25.7 | 26.8 | 36.2 | 28.9 | 23.6 | 27 | 33 | 28 | 27.7 | 33.3 | 35.2 |
| 24. | SEQID 184 | 27.4 | 25.7 | 25.6 | 26.2 | 34.9 | 31.8 | 23.7 | 32.8 | 33.6 | 30.6 | 29.8 | 34.2 | 33 |
| 25. | SEQID 186 | 30 | 28.3 | 27 | 29 | 28.2 | 25.4 | 22.6 | 25.6 | 25.8 | 28 | 32.4 | 26.9 | 28.3 |
| 26. | SEQID 188 | 23.6 | 21.3 | 22.1 | 24.8 | 27.5 | 23.1 | 27.9 | 23 | 29.1 | 23.2 | 25.8 | 23.4 | 28.3 |
| 27. | SEQID 190 | 52 | 49.7 | 46.2 | 45.1 | 28.6 | 37.1 | 22.2 | 32.2 | 28.9 | 36.1 | 32.2 | 35.1 | 27.2 |
| 28. | SEQID 192 | 27.5 | 26.1 | 27.8 | 26.9 | 29.1 | 26.4 | 24.7 | 24.6 | 30.4 | 24.9 | 28.7 | 27.4 | 29.2 |
| 29. | SEQID 194 | 46.2 | 45.3 | 41.8 | 40.1 | 31.5 | 32.8 | 26.6 | 31.3 | 33.2 | 30.9 | 32.6 | 31.4 | 30.7 |
| 30. | SEQID 196 | 34.1 | 31.4 | 31 | 30.9 | 37.3 | 44.6 | 26.2 | 77.7 | 33.2 | 46.2 | 28.8 | 51.1 | 34.9 |
| 31. | SEQID 198 | 18.9 | 19.2 | 19.9 | 19.9 | 23.7 | 20 | 24.9 | 21.4 | 22.5 | 23.7 | 22.8 | 22.1 | 25.1 |
| 32. | SEQID 200 | 57.4 | 55.4 | 48.4 | 46.9 | 30.1 | 35.5 | 22.1 | 32.4 | 31.5 | 34.5 | 32 | 34.5 | 29.7 |
| 33. | SEQID 202 | 67.1 | 59.2 | 53.5 | 54.4 | 28.6 | 33.8 | 20.4 | 31.5 | 30.3 | 33.2 | 31.1 | 35 | 31 |
| 34. | SEQID 204 | 66 | 58 | 51.1 | 52.5 | 28.8 | 31.1 | 20.3 | 31.2 | 28.6 | 34 | 30.5 | 34.6 | 31 |
| 35. | SEQID 206 | 51.8 | 49 | 45.6 | 45.3 | 30.2 | 34.7 | 22.3 | 33.5 | 29.5 | 34.5 | 30.7 | 36.8 | 28.3 |
| 36. | SEQID 208 | 50.3 | 47.8 | 44.2 | 44.2 | 29.6 | 34.8 | 22.4 | 32.7 | 28.9 | 33.4 | 30.6 | 36 | 28.7 |
| 37. | SEQID 210 | 33.6 | 31.4 | 33.9 | 34 | 38.2 | 44.3 | 26.8 | 67.9 | 37.6 | 46.3 | 29.5 | 48.6 | 33.9 |
| 38. | SEQID 212 | 63.7 | 57 | 49.9 | 52.2 | 28 | 34 | 22.3 | 31.6 | 28.4 | 33.8 | 31.2 | 34.3 | 29.6 |
| 39. | SEQID 214 | 50.8 | 48.2 | 40.3 | 43.5 | 26.1 | 32.4 | 20.4 | 30.6 | 28.4 | 31 | 25.6 | 34 | 25.4 |
| 40. | SEQID 216 | 57.9 | 53.2 | 49.5 | 48.5 | 27.3 | 32.3 | 19.9 | 29.9 | 27.7 | 31.8 | 31.6 | 31 | 27.4 |
| 41. | SEQID 218 | 28.6 | 26.6 | 28.8 | 30.1 | 44.4 | 31.5 | 26.3 | 29.1 | 44.6 | 29.4 | 25.3 | 32.2 | 50 |
| 42. | SEQID 220 | 30.4 | 30.2 | 30.1 | 31.2 | 45.8 | 32.3 | 25 | 31.5 | 48 | 30.6 | 27.9 | 32.4 | 52.1 |
| 43. | SEQID 222 | 26.5 | 24.5 | 24.9 | 25.6 | 37.7 | 26.9 | 28.8 | 25.3 | 37.5 | 25.6 | 21 | 27.1 | 41.8 |
| 44. | SEQID 224 | 28.1 | 29.1 | 29.3 | 29.6 | 44.5 | 31.1 | 24.7 | 29.9 | 46.9 | 29.5 | 27.5 | 30.5 | 51.3 |
| 45. | SEQID 228 | 29.4 | 27.6 | 29.3 | 30.7 | 45.3 | 31 | 24.8 | 29.7 | 45 | 30.3 | 24.9 | 31.8 | 49.4 |
| 46. | SEQID 230 | | 68.5 | 52.9 | 51.9 | 30.8 | 33.3 | 22.1 | 31.9 | 31.4 | 35.1 | 32.9 | 36 | 29.1 |
| 47. | SEQID 232 | 80.1 | | 46 | 47.6 | 27.8 | 29.5 | 20.5 | 30 | 29.7 | 35.6 | 32.9 | 32.8 | 27.4 |
| 48. | SEQID 234 | 68.3 | 62.6 | | 69.4 | 27.5 | 34 | 20.3 | 31.7 | 28.4 | 32.5 | 29.7 | 32.9 | 26 |
| 49. | SEQID 236 | 69.8 | 66.4 | 80.5 | | 28.6 | 31.9 | 21.2 | 30.8 | 29.4 | 33.9 | 30.8 | 33.1 | 27.8 |
| 50. | SEQID 240 | 39.9 | 37.9 | 37.4 | 41.1 | | 31.3 | 28.6 | 33.9 | 42 | 32.3 | 28.4 | 36.6 | 40.4 |
| 51. | SEQID 242 | 45.4 | 42.4 | 46 | 43.8 | 45.9 | | 22.3 | 41.3 | 33.2 | 41.7 | 25.4 | 52.8 | 31.3 |
| 52. | SEQID 244 | 31.8 | 31.1 | 31.9 | 31.3 | 47.2 | 38 | | 23.3 | 27 | 23.3 | 22.2 | 23.2 | 28 |
| 53. | SEQID 246 | 45.9 | 41.1 | 44.2 | 43 | 49.3 | 60.7 | 38.9 | | 32.8 | 43.1 | 26 | 47.5 | 31.1 |
| 54. | SEQID 248 | 44.6 | 40 | 39.5 | 40.9 | 60.2 | 47.2 | 39.4 | 48.7 | | 30.5 | 29.3 | 33.2 | 39.9 |
| 55. | SEQID 250 | 44.9 | 48.7 | 44.9 | 47.1 | 44.4 | 53.8 | 33.7 | 56.5 | 42.9 | | 29.2 | 46.7 | 30.2 |
| 56. | SEQID 252 | 47.2 | 45.8 | 39.5 | 43.5 | 40.2 | 40.9 | 32.6 | 42.4 | 41.8 | 44.4 | | 26.5 | 26.9 |
| 57. | SEQID 254 | 45.4 | 41.6 | 43.1 | 44.5 | 57.9 | 63.6 | 39.6 | 61.1 | 49.8 | 56.5 | 38.4 | | 31.9 |
| 58. | SEQID 256 | 39.6 | 36.6 | 37.1 | 35.9 | 58.3 | 46.9 | 42.1 | 45 | 54.2 | 41.9 | 39.9 | 46.5 | |

### Example 12

### Identification of Domains Comprised in Polypeptide Sequences Useful in Performing the Methods of the Invention

[0448] The Integrated Resource of Protein Families, Domains and Sites (InterPro) database is an integrated interface for the commonly used signature databases for text- and sequence-based searches. The InterPro database combines these databases, which use different methodologies and varying degrees of biological information about well-characterized proteins to derive protein signatures. Collaborating databases include SWISS-PROT, PROSITE, TrEMBL, PRINTS, ProDom and Pfam, Smart and TIGRFAMs. Interpro is hosted at the European Bioinformatics Institute in the United Kingdom.

[0449] The results of the InterPro scan of the polypeptide sequence as represented by SEQ ID NO: 132 resented in Table 16.

TABLE 16
InterPro scan results of the polypeptide sequence as represented
by SEQ ID NO: 132

| Database | Accession number | Accession name |
|---|---|---|
| PRODOM | PD001423 | Q9SP16_ORYSA_Q9SP16; |
| PRINTS | PR00367 | ETHRSPELEMNT |
| GENE3D | G3DSA:3.30.730.10 | no description |
| PFAM | PF00847 | AP2 |
| SMART | SM00380 | AP2 |
| PROFILE | PS51032 | AP2_ERF |
| SUPERFAMILY | SSF54171 | DNA binding domain |

### Example 13

### Topology Prediction of the Polypeptide Sequences Useful in Performing the Methods of the Invention (Subcellular Localization, Transmembrane . . . )

[0450] TargetP 1.1 predicts the subcellular location of eukaryotic proteins. The location assignment is based on the predicted presence of any of the N-terminal pre-sequences: chloroplast transit peptide (cTP), mitochondrial targeting peptide (mTP) or secretory pathway signal peptide (SP). Scores on which the final prediction is based are not really probabilities, and they do not necessarily add to one. However, the location with the highest score is the most likely according to TargetP, and the relationship between the scores (the reliability class) may be an indication of how certain the prediction is. The reliability class (RC) ranges from 1 to 5, where 1 indicates the strongest prediction. TargetP is maintained at the server of the Technical University of Denmark.

[0451] For the sequences predicted to contain an N-terminal presequence a potential cleavage site can also be predicted.

[0452] A number of parameters were selected, such as organism group (non-plant or plant), cutoff sets (none, predefined set of cutoffs, or user-specified set of cutoffs), and the calculation of prediction of cleavage sites (yes or no).

[0453] The results of TargetP 1.1 analysis of the polypeptide sequence as represented by SEQ ID NO: 132 are presented Table 17. The “plant” organism group has been selected, no cutoffs defined, and the predicted length of the transit peptide requested. The subcellular localization of the polypeptide sequence as represented by SEQ ID NO: 132 may be the cytoplasm or nucleus, no transit peptide is predicted.

TABLE 17
TargetP 1.1 analysis of the polypeptide sequence as represented
by SEQ ID NO: 132

| | |
|---|---|
| Length (AA) | 130 |
| Chloroplastic transit peptide | 0.098 |
| Mitochondrial transit peptide | 0.339 |
| Secretory pathway signal peptide | 0.035 |
| Other subcellular targeting | 0.797 |
| Predicted Location | / |
| Reliability class | 3 |
| Predicted transit peptide length | / |

[0454] Many other algorithms can be used to perform such analyses, including:
[0455] ChloroP 1.1 hosted on the server of the Technical University of Denmark;
[0456] Protein Prowler Subcellular Localisation Predictor version 1.2 hosted on the server of the Institute for Molecular Bioscience, University of Queensland, Brisbane, Australia;
[0457] PENCE Proteome Analyst PA-GOSUB 2.5 hosted on the server of the University of Alberta, Edmonton, Alberta, Canada;
[0458] TMHMM, hosted on the server of the Technical University of Denmark

### Example 14

### Expression Vector Construction Using the Nucleic Acid Sequence as Represented by SEQ ID NO: 131

[0459] Unless otherwise stated, recombinant DNA techniques are performed according to standard protocols described in (Sambrook (2001) Molecular Cloning: a laboratory manual, 3rd Edition Cold Spring Harbor Laboratory Press, CSH, New York) or in Volumes 1 and 2 of Ausubel et al. (1994), Current Protocols in Molecular Biology, Current Protocols. Standard materials and methods for plant molecular work are described in Plant Molecular Biology Labfax (1993) by R. D. D. Croy, published by BIOS Scientific Publications Ltd (UK) and Blackwell Scientific Publications (UK).

[0460] The Oryza sativa AP2-2 gene was amplified by PCR from a rice cDNA library. The PCR fragment of the expected length was purified and subsequently cloned in a Gateway® vector using standard technology. The entry clone comprising SEQ ID NO: 131 was then used in an LR reaction with a destination vector used for Oryza sativa transformation. This vector contained as functional elements within the T-DNA borders: a plant selectable marker; a screenable marker expression cassette; and a Gateway cassette intended for LR in vivo recombination with the nucleic acid sequence of interest already cloned in the entry clone. A rice GOS2 promoter (SEQ ID NO: 39) for root specific expression was located upstream of this Gateway cassette.

[0461] After the LR recombination step, the resulting expression vector pGOS2::AP2-2 (FIG. 23) was transformed into Agrobacterium strain LBA4044 according to methods well known in the art.

### Example 15

### Plant Transformation

### Rice Transformation

[0462] The Agrobacterium containing the expression vector was used to transform Oryza sativa plants. Mature dry seeds of the rice japonica cultivar Nipponbare were dehusked. Sterilization was carried out by incubating for one minute in 70% ethanol, followed by 30 minutes in 0.2% HgCl₂, followed by a 6 times 15 minutes wash with sterile distilled water. The sterile seeds were then germinated on a medium containing 2,4-D (callus induction medium). After incubation in the dark for four weeks, embryogenic, scutellum-derived calli were excised and propagated on the same medium. After two weeks, the calli were multiplied or propagated by subculture on the same medium for another 2 weeks. Embryogenic callus pieces were sub-cultured on fresh medium 3 days before co-cultivation (to boost cell division activity).

[0463] Agrobacterium strain LBA4404 containing the expression vector was used for co-cultivation. Agrobacterium was inoculated on AB medium with the appropriate antibiotics and cultured for 3 days at 28° C. The bacteria were then collected and suspended in liquid co-cultivation medium to a density (OD₆₀₀) of about 1. The suspension was then transferred to a Petri dish and the calli immersed in the suspension for 15 minutes. The callus tissues were then blotted dry on a filter paper and transferred to solidified, co-cultivation medium and incubated for 3 days in the dark at 25° C. Co-cultivated calli were grown on 2,4-D-containing medium for 4 weeks in the dark at 28° C. in the presence of a selection agent. During this period, rapidly growing resistant callus islands developed. After transfer of this material to a regeneration medium and incubation in the light, the embryogenic potential was released and shoots developed in the next four to five weeks. Shoots were excised from the calli and incubated for 2 to 3 weeks on an auxin-containing medium from which they were transferred to soil. Hardened shoots were grown under high humidity and short days in a greenhouse.

[0464] Approximately 35 independent T0 rice transformants were generated for one construct. The primary transformants were transferred from a tissue culture chamber to a greenhouse. After a quantitative PCR analysis to verify copy number of the T-DNA insert, only single copy transgenic plants that exhibit tolerance to the selection agent were kept for harvest of T1 seed. Seeds were then harvested three to five months after transplanting. The method yielded single locus transformants at a rate of over 50% (Aldemita and Hodges 1996, Chan et al. 1993, Hiei et al. 1994).

### Corn Transformation

[0465] Transformation of maize (Zea mays) is performed with a modification of the method described by Ishida et al. (1996) Nature Biotech 14(6): 745-50. Transformation is genotype-dependent in corn and only specific genotypes are amenable to transformation and regeneration. The inbred line A188 (University of Minnesota) or hybrids with A188 as a parent are good sources of donor material for transformation, but other genotypes can be used successfully as well. Ears are harvested from corn plant approximately 11 days after pollination (DAP) when the length of the immature embryo is about 1 to 1.2 mm. Immature embryos are cocultivated with Agrobacterium tumefaciens containing the expression vector, and transgenic plants are recovered through organogenesis. Excised embryos are grown on callus induction medium, then maize regeneration medium, containing the selection agent (for example imidazolinone but various selection markers can be used). The Petri plates are incubated in the light at 25° C. for 2-3 weeks, or until shoots develop. The green shoots are transferred from each embryo to maize rooting medium and incubated at 25° C. for 2-3 weeks, until roots develop. The rooted shoots are transplanted to soil in the greenhouse. T1 seeds are produced from plants that exhibit tolerance to the selection agent and that contain a single copy of the T-DNA insert.

### Wheat Transformation

[0466] Transformation of wheat is performed with the method described by Ishida et al. (1996) Nature Biotech 14(6): 745-50. The cultivar Bobwhite (available from CIMMYT, Mexico) is commonly used in transformation. Immature embryos are co-cultivated with Agrobacterium tumefaciens containing the expression vector, and transgenic plants are recovered through organogenesis. After incubation with Agrobacterium, the embryos are grown in vitro on callus induction medium, then regeneration medium, containing the selection agent (for example imidazolinone but various selection markers can be used). The Petri plates are incubated in the light at 25° C. for 2-3 weeks, or until shoots develop. The green shoots are transferred from each embryo to rooting medium and incubated at 25° C. for 2-3 weeks, until roots develop. The rooted shoots are transplanted to soil in the greenhouse. T1 seeds are produced from plants that exhibit tolerance to the selection agent and that contain a single copy of the T-DNA insert.

### Soybean Transformation

[0467] Soybean is transformed according to a modification of the method described in the Texas A&M U.S. Pat. No. 5,164,310. Several commercial soybean varieties are amenable to transformation by this method. The cultivar Jack (available from the Illinois Seed foundation) is commonly used for transformation. Soybean seeds are sterilised for in vitro sowing. The hypocotyl, the radicle and one cotyledon are excised from seven-day old young seedlings. The epicotyl and the remaining cotyledon are further grown to develop axillary nodes. These axillary nodes are excised and incubated with Agrobacterium tumefaciens containing the expression vector. After the cocultivation treatment, the explants are washed and transferred to selection media. Regenerated shoots are excised and placed on a shoot elongation medium. Shoots no longer than 1 cm are placed on rooting medium until roots develop. The rooted shoots are transplanted to soil in the greenhouse. T1 seeds are produced from plants that exhibit tolerance to the selection agent and that contain a single copy of the T-DNA insert.

### Rapeseed/Canola Transformation

[0468] Cotyledonary petioles and hypocotyls of 5-6 day old young seedling are used as explants for tissue culture and transformed according to Babic et al. (1998, Plant Cell Rep 17: 183-188). The commercial cultivar Westar (Agriculture Canada) is the standard variety used for transformation, but other varieties can also be used. Canola seeds are surface-sterilized for in vitro sowing. The cotyledon petiole explants with the cotyledon attached are excised from the in vitro seedlings, and inoculated with Agrobacterium (containing the expression vector) by dipping the cut end of the petiole explant into the bacterial suspension. The explants are then cultured for 2 days on MSBAP-3 medium containing 3 mg/l BAP, 3% sucrose, 0.7% Phytagar at 23° C., 16 hr light. After two days of co-cultivation with Agrobacterium, the petiole explants are transferred to MSBAP-3 medium containing 3 mg/l BAP, cefotaxime, carbenicillin, or timentin (300 mg/l) for 7 days, and then cultured on MSBAP-3 medium with cefotaxime, carbenicillin, or timentin and selection agent until shoot regeneration. When the shoots are 5-10 mm in length, they are cut and transferred to shoot elongation medium (MSBAP-0.5, containing 0.5 mg/l BAP). Shoots of about 2 cm in length are transferred to the rooting medium (MS0) for root induction. The rooted shoots are transplanted to soil in the greenhouse. T1 seeds are produced from plants that exhibit tolerance to the selection agent and that contain a single copy of the T-DNA insert.

### Alfalfa Transformation

[0469] A regenerating clone of alfalfa (Medicago sativa) is transformed using the method of (McKersie et al., 1999 Plant Physiol 119: 839-847). Regeneration and transformation of alfalfa is genotype dependent and therefore a regenerating plant is required. Methods to obtain regenerating plants have been described. For example, these can be selected from the cultivar Rangelander (Agriculture Canada) or any other commercial alfalfa variety as described by Brown D C W and A Atanassov (1985. Plant Cell Tissue Organ Culture 4: 111-112). Alternatively, the RA3 variety (University of Wisconsin) has been selected for use in tissue culture (Walker et al., 1978 μm J Bot 65:654-659). Petiole explants are cocultivated with an overnight culture of Agrobacterium tumefaciens C58C1 pMP90 (McKersie et al., 1999 Plant Physiol 119: 839-847) or LBA4404 containing the expression vector. The explants are cocultivated for 3 d in the dark on SH induction medium containing 288 mg/L Pro, 53 mg/L thioproline, 4.35 g/L K2SO4, and 100 μm acetosyringinone. The explants are washed in half-strength Murashige-Skoog medium (Murashige and Skoog, 1962) and plated on the same SH induction medium without acetosyringinone but with a suitable selection agent and suitable antibiotic to inhibit Agrobacterium growth. After several weeks, somatic embryos are transferred to BOi2Y development medium containing no growth regulators, no antibiotics, and 50 g/L sucrose. Somatic embryos are subsequently germinated on half-strength Murashige-Skoog medium. Rooted seedlings were transplanted into pots and grown in a greenhouse. T1 seeds are produced from plants that exhibit tolerance to the selection agent and that contain a single copy of the T-DNA insert.

### Example 16

### Phenotypic Evaluation Procedure

### 16.1 Evaluation Setup

[0470] Approximately 35 independent T0 rice transformants were generated. The primary transformants were transferred from a tissue culture chamber to a greenhouse for growing and harvest of T1 seed. Six events, of which the T1 progeny segregated 3:1 for presence/absence of the transgene, were retained. For each of these events, approximately 10 T1 seedlings containing the transgene (hetero- and homo-zygotes) and approximately 10 T1 seedlings lacking the transgene (nullizygotes) were selected by monitoring visual marker expression. The transgenic plants and the corresponding nullizygotes were grown side-by-side at random positions. Greenhouse conditions were of shorts days (12 hours light), 28° C. in the light and 22° C. in the dark, and a relative humidity of 70%.

[0471] Four T1 events were further evaluated in the T2 generation following the same evaluation procedure as for the T1 generation but with more individuals per event. From the stage of sowing until the stage of maturity the plants were passed several times through a digital imaging cabinet. At each time point digital images (2048×1536 pixels, 16 million colours) were taken of each plant from at least 6 different angles.

### 16.2 Statistical Analysis: F-Test

[0472] A two factor ANOVA (analysis of variants) was used as a statistical model for the overall evaluation of plant phenotypic characteristics. An F-test was carried out on all the parameters measured of all the plants of all the events transformed with the gene of the present invention. The F-test was carried out to check for an effect of the gene over all the transformation events and to verify for an overall effect of the gene, also known as a global gene effect. The threshold for significance for a true global gene effect was set at a 5% probability level for the F-test. A significant F-test value points to a gene effect, meaning that it is not only the mere presence or position of the gene that is causing the differences in phenotype.

### 16.3 Parameters Measured

### Biomass-Related Parameter Measurement

[0473] From the stage of sowing until the stage of maturity the plants were passed several times through a digital imaging cabinet. At each time point digital images (2048×1536 pixels, 16 million colours) were taken of each plant from at least 6 different angles.

[0474] The plant aboveground area (or leafy biomass) was determined by counting the total number of pixels on the digital images from aboveground plant parts discriminated from the background. This value was averaged for the pictures taken on the same time point from the different angles and was converted to a physical surface value expressed in square mm by calibration. Experiments show that the aboveground plant area measured this way correlates with the biomass of plant parts above ground. The above ground area is the area measured at the time point at which the plant had reached its maximal leafy biomass. The early vigour is the plant (seedling) aboveground area three weeks post-germination. Increase in root biomass is expressed as an increase in total root biomass (measured as maximum biomass of roots observed during the lifespan of a plant); or as an increase in the root/shoot index (measured as the ratio between root mass and shoot mass in the period of active growth of root and shoot).

### Seed-Related Parameter Measurements

[0475] The mature primary panicles were harvested, counted, bagged, barcode-labelled and then dried for three days in an oven at 37° C. The panicles were then threshed and all the seeds were collected and counted. The filled husks were separated from the empty ones using an air-blowing device. The empty husks were discarded and the remaining fraction was counted again. The filled husks were weighed on an analytical balance. The number of filled seeds was determined by counting the number of filled husks that remained after the separation step. The total seed yield was measured by weighing all filled husks harvested from a plant. Total seed number per plant was measured by counting the number of husks harvested from a plant. Thousand Kernel Weight (TKW) is extrapolated from the number of filled seeds counted and their total weight. The Harvest Index (HI) in the present invention is defined as the ratio between the total seed yield and the above ground area (mm²), multiplied by a factor 10⁶. The total number of flowers per panicle as defined in the present invention is the ratio between the total number of seeds and the number of mature primary panicles. The seed fill rate as defined in the present invention is the proportion (expressed as a %) of the number of filled seeds over the total number of seeds (or florets).

### Example 17

### Results of the Phenotypic Evaluation of the Transgenic Plants

[0476] The results of the evaluation of transgenic rice plants expressing the AP2-2 nucleic acid are as follows.

[0477] There was an increase in yield compared to corresponding nullizygotes (controls), in particular seed yield, expressed as Thousand Kernel Weight and Harvest Index, was statistically significant increased compared to the control plants. For the TKW, an overall increase of 2% in T1 and of 3.4% in T2 was observed compared to control plants. In the case of harvest index, the overall increase compared to control plants was respectively 9.2% (T1) and 36.2% (T2).

### D) APETELA2-70-Like (AP2-70-Like) Polypeptide

### Example 18

### Identification of AP2-70-Like Sequences

[0478] Sequences (full length cDNA, ESTs or genomic) related to SEQ ID NO: 257 and/or protein sequences related to SEQ ID NO: 258 were identified amongst those maintained in the Entrez Nucleotides database at the National Center for Biotechnology Information (NCBI) using database sequence search tools, such as the Basic Local Alignment Tool (BLAST) (Altschul et al. (1990) J. Mol. Biol. 215:403-410; and Altschul et al. (1997) Nucleic Acids Res. 25:3389-3402). The program was used to find regions of local similarity between sequences by comparing nucleic acid or polypeptide sequences to sequence databases and by calculating the statistical significance of matches. The polypeptide encoded by SEQ ID NO: 257 was used for the TBLASTN algorithm, with default settings and the filter to ignore low complexity sequences set off. The output of the analysis was viewed by pairwise comparison, and ranked according to the probability score (E-value), where the score reflects the probability that a particular alignment occurs by chance (the lower the E-value, the more significant the hit). In addition to E-values, comparisons were also scored by percentage identity. Percentage identity refers to the number of identical nucleotides (or amino acids) between the two compared nucleic acid (or polypeptide) sequences over a particular length. In some instances, the default parameters may be adjusted to modify the stringency of the search.

[0479] Table 18 provides a list of nucleic acid and protein sequences related to the nucleic acid sequence as represented by SEQ ID NO: 257 and the protein sequence represented by SEQ ID NO: 258.

TABLE 18
AP2-70-encoding nucleic acid sequences and AP2-70 polypeptides useful
in the methods of the present invention.

| | | Nucleic acid | Poly-peptide | |
|---|---|---|---|---|
| Name | Source organism | SEQ ID NO: | SEQ ID NO: | Status |
| | Oryza sativa | 257 | 258 | Full length |
| | Oryza sativa | 259 | 260 | Full length |
| NP_001049235.1 | Oryza sativa | 261 | 262 | full length |
| ABB90886.1 | Triticum aestivum | 263 | 264 | Full length |
| AAZ08560.1\| | Triticum aestivum | 265 | 266 | Full length |
| AAX13274.1 | Triticum aestivum | 267 | 268 | Full length |
| NM_001054677.1 | Oryza sativa | 269 | 270 | Full length |
| ABK28776.1 | Arabidopsis thaliana | 271 | 272 | Full length |
| BAD37688.1 | Oryza sativa | 273 | 274 | Full length |
| ABB89754.1 | Asparagus officinalis | 275 | 276 | Full length |
| ABJ09421.1 | Aloe vera | 277 | 278 | Full length |
| AAT39542.1 | Gossypium hirsutum | 279 | 280 | Full length |
| AAF17691.1 | Arabidopsis thaliana | 281 | 282 | Full length |
| NP_177931.1 | Arabidopsis thaliana | 283 | 284 | Full length |
| NP_195688.1 | Arabidopsis thaliana | 285 | 286 | Full length |
| AAM08622.1 | Oryza sativa | 287 | 288 | Full length |
| ABB89755.1 | Broussonetia papyrifera | 289 | 290 | Full length |
| AAZ14831.1 | Jatropha curcas | 291 | 292 | Full length |
| AAC49770.1 | Arabidopsis thaliana | 293 | 294 | Full length |
| NP_001063013.1 | Oryza sativa | 295 | 296 | Full length |
| NP_001061779.1 | Oryza sativa | 297 | 298 | Full length |
| AAO13360.1 | Lycopersicon esculentum | 299 | 300 | Full length |
| AAM80486.1 | Zea mays | 301 | 302 | Full length |
| AAP56252.1 | Oryza sativa | 303 | 304 | Full length |
| AAF76898.1 | Atriplex hortensis | 305 | 306 | Full length |
| NP_173638.1 | Arabidopsis thaliana | 307 | 308 | Full length |
| NP_179810.1 | Arabidopsis thaliana | 309 | 310 | Full length |
| AAZ03388.1 | Glycine max | 311 | 312 | Full length |
| NP_564468.1 | Arabidopsis thaliana | 313 | 314 | Full length |
| NP_179685.1 | Arabidopsis thaliana | 315 | 316 | Full length |
| NP_193098.1 | Arabidopsis thaliana | 317 | 318 | Full length |
| BAD25342.1 | Oryza sativa | 319 | 320 | Full length |
| NP_001053379.1 | Oryza sativa | 321 | 322 | Full length |
| CAD41199.2 | Oryza sativa | 323 | 324 | Full length |
| NP_176620.1 | Arabidopsis thaliana | 325 | 326 | Full length |
| 11978.m07152 | Oryza sativa | 327 | 328 | Full length |
| 11975.m09040 | Oryza sativa | 329 | 330 | Full length |

### Example 19

### Alignment of AP2-70-Like Polypeptide Sequences

[0480] Alignment of polypeptide sequences was performed using the AlignX programme from the Vector NTI (Invitrogen) which is based on the popular Clustal algorithm of progressive alignment (Thompson et al. (1997) Nucleic Acids Res 25:4876-4882; Chenna et al. (2003). Nucleic Acids Res 31:3497-3500). Default values are for the gap open penalty of 10, for the gap extension penalty of 0,1 and the selected weight matrix is Blosum 62 (if polypeptides are aligned).

[0481] A phylogenetic tree of AP2-70-like polypeptides was constructed using a neighbour-joining clustering algorithm as provided in the AlignX programme from the Vector NTI (Invitrogen).

### Example 20

### Cloning and Vector Construction

[0482] Unless otherwise stated, recombinant DNA techniques are performed according to standard protocols described in (Sambrook (2001) Molecular Cloning: a laboratory manual, 3rd Edition Cold Spring Harbor Laboratory Press, CSH, New York) or in Volumes 1 and 2 of Ausubel et al. (1994), Current Protocols in Molecular Biology, Current Protocols. Standard materials and methods for plant molecular work are described in Plant Molecular Biology Labfax (1993) by R. D. D. Croy, published by BIOS Scientific Publications Ltd (UK) and Blackwell Scientific Publications (UK).

[0483] The Oryza sativa AP2-70 gene was amplified by PCR from a rice cDNA library. The PCR fragment of the expected length was purified and subsequently cloned in a Gateways vector using standard technology. The entry clone comprising SEQ ID NO: 257 was then used in an LR reaction with a destination vector used for Oryza sativa transformation. This vector contained as functional elements within the T-DNA borders: a plant selectable marker; a screenable marker expression cassette; and a Gateway cassette intended for LR in vivo recombination with the nucleic acid sequence of interest already cloned in the entry clone. A rice GOS2 promoter (SEQ ID NO: 39) for constitutive expression was located upstream of this Gateway cassette.

[0484] After the LR recombination step, the resulting expression vector pGOS2::AP2-70 (FIG. 25) was transformed into Agrobacterium strain LBA4044 according to methods well known in the art.

[0485] A second vector identical to above except comprising an RCc3 promoter (SEQ ID NO: 110) for root-specific expression was also made. Again, after the LR recombination step, the resulting expression vector pRCc3::AP2-70 (FIG. 24) was transformed into Agrobacterium strain LBA4044 according to methods well known in the art.

### Example 21

### Plant Transformation

### Rice Transformation

[0486] The Agrobacterium containing the expression vector was used to transform Oryza sativa plants. Mature dry seeds of the rice japonica cultivar Nipponbare were dehusked. Sterilization was carried out by incubating for one minute in 70% ethanol, followed by 30 minutes in 0.2% HgCl₂, followed by a 6 times 15 minutes wash with sterile distilled water. The sterile seeds were then germinated on a medium containing 2,4-D (callus induction medium). After incubation in the dark for four weeks, embryogenic, scutellum-derived calli were excised and propagated on the same medium. After two weeks, the calli were multiplied or propagated by subculture on the same medium for another 2 weeks. Embryogenic callus pieces were sub-cultured on fresh medium 3 days before co-cultivation (to boost cell division activity).

[0487] Agrobacterium strain LBA4404 containing the expression vector was used for co-cultivation. Agrobacterium was inoculated on AB medium with the appropriate antibiotics and cultured for 3 days at 28° C. The bacteria were then collected and suspended in liquid co-cultivation medium to a density (OD₆₀₀) of about 1. The suspension was then transferred to a Petri dish and the calli immersed in the suspension for 15 minutes. The callus tissues were then blotted dry on a filter paper and transferred to solidified, co-cultivation medium and incubated for 3 days in the dark at 25° C. Co-cultivated calli were grown on 2,4-D-containing medium for 4 weeks in the dark at 28° C. in the presence of a selection agent. During this period, rapidly growing resistant callus islands developed. After transfer of this material to a regeneration medium and incubation in the light, the embryogenic potential was released and shoots developed in the next four to five weeks. Shoots were excised from the calli and incubated for 2 to 3 weeks on an auxin-containing medium from which they were transferred to soil. Hardened shoots were grown under high humidity and short days in a greenhouse.

[0488] Approximately 35 independent T0 rice transformants were generated for one construct. The primary transformants were transferred from a tissue culture chamber to a greenhouse. After a quantitative PCR analysis to verify copy number of the T-DNA insert, only single copy transgenic plants that exhibit tolerance to the selection agent were kept for harvest of T1 seed. Seeds were then harvested three to five months after transplanting. The method yielded single locus transformants at a rate of over 50% (Aldemita and Hodges 1996, Chan et al. 1993, Hiei et al. 1994).

### Corn Transformation

[0489] Transformation of maize (Zea mays) is performed with a modification of the method described by Ishida et al. (1996) Nature Biotech 14(6): 745-50. Transformation is genotype-dependent in corn and only specific genotypes are amenable to transformation and regeneration. The inbred line A188 (University of Minnesota) or hybrids with A188 as a parent are good sources of donor material for transformation, but other genotypes can be used successfully as well. Ears are harvested from corn plant approximately 11 days after pollination (DAP) when the length of the immature embryo is about 1 to 1.2 mm. Immature embryos are cocultivated with Agrobacterium tumefaciens containing the expression vector, and transgenic plants are recovered through organogenesis. Excised embryos are grown on callus induction medium, then maize regeneration medium, containing the selection agent (for example imidazolinone but various selection markers can be used). The Petri plates are incubated in the light at 25° C. for 2-3 weeks, or until shoots develop. The green shoots are transferred from each embryo to maize rooting medium and incubated at 25° C. for 2-3 weeks, until roots develop. The rooted shoots are transplanted to soil in the greenhouse. T1 seeds are produced from plants that exhibit tolerance to the selection agent and that contain a single copy of the T-DNA insert.

### Wheat Transformation

[0490] Transformation of wheat is performed with the method described by Ishida et al. (1996) Nature Biotech 14(6): 745-50. The cultivar Bobwhite (available from CIMMYT, Mexico) is commonly used in transformation. Immature embryos are co-cultivated with Agrobacterium tumefaciens containing the expression vector, and transgenic plants are recovered through organogenesis. After incubation with Agrobacterium, the embryos are grown in vitro on callus induction medium, then regeneration medium, containing the selection agent (for example imidazolinone but various selection markers can be used). The Petri plates are incubated in the light at 25° C. for 2-3 weeks, or until shoots develop. The green shoots are transferred from each embryo to rooting medium and incubated at 25° C. for 2-3 weeks, until roots develop. The rooted shoots are transplanted to soil in the greenhouse. T1 seeds are produced from plants that exhibit tolerance to the selection agent and that contain a single copy of the T-DNA insert.

### Soybean Transformation

[0491] Soybean is transformed according to a modification of the method described in the Texas A&M U.S. Pat. No. 5,164,310. Several commercial soybean varieties are amenable to transformation by this method. The cultivar Jack (available from the Illinois Seed foundation) is commonly used for transformation. Soybean seeds are sterilised for in vitro sowing. The hypocotyl, the radicle and one cotyledon are excised from seven-day old young seedlings. The epicotyl and the remaining cotyledon are further grown to develop axillary nodes. These axillary nodes are excised and incubated with Agrobacterium tumefaciens containing the expression vector. After the cocultivation treatment, the explants are washed and transferred to selection media. Regenerated shoots are excised and placed on a shoot elongation medium. Shoots no longer than 1 cm are placed on rooting medium until roots develop. The rooted shoots are transplanted to soil in the greenhouse. T1 seeds are produced from plants that exhibit tolerance to the selection agent and that contain a single copy of the T-DNA insert.

### Rapeseed/Canola Transformation

[0492] Cotyledonary petioles and hypocotyls of 5-6 day old young seedling are used as explants for tissue culture and transformed according to Babic et al. (1998, Plant Cell Rep 17: 183-188). The commercial cultivar Westar (Agriculture Canada) is the standard variety used for transformation, but other varieties can also be used. Canola seeds are surface-sterilized for in vitro sowing. The cotyledon petiole explants with the cotyledon attached are excised from the in vitro seedlings, and inoculated with Agrobacterium (containing the expression vector) by dipping the cut end of the petiole explant into the bacterial suspension. The explants are then cultured for 2 days on MSBAP-3 medium containing 3 mg/l BAP, 3% sucrose, 0.7% Phytagar at 23° C., 16 hr light. After two days of co-cultivation with Agrobacterium, the petiole explants are transferred to MSBAP-3 medium containing 3 mg/l BAP, cefotaxime, carbenicillin, or timentin (300 mg/l) for 7 days, and then cultured on MSBAP-3 medium with cefotaxime, carbenicillin, or timentin and selection agent until shoot regeneration. When the shoots are 5-10 mm in length, they are cut and transferred to shoot elongation medium (MSBAP-0.5, containing 0.5 mg/l BAP). Shoots of about 2 cm in length are transferred to the rooting medium (MS0) for root induction. The rooted shoots are transplanted to soil in the greenhouse. T1 seeds are produced from plants that exhibit tolerance to the selection agent and that contain a single copy of the T-DNA insert.

### Alfalfa Transformation

[0493] A regenerating clone of alfalfa (Medicago sativa) is transformed using the method of (McKersie et al., 1999 Plant Physiol 119: 839-847). Regeneration and transformation of alfalfa is genotype dependent and therefore a regenerating plant is required. Methods to obtain regenerating plants have been described. For example, these can be selected from the cultivar Rangelander (Agriculture Canada) or any other commercial alfalfa variety as described by Brown D C W and A Atanassov (1985. Plant Cell Tissue Organ Culture 4: 111-112). Alternatively, the RA3 variety (University of Wisconsin) has been selected for use in tissue culture (Walker et al., 1978 μm J Bot 65:654-659). Petiole explants are cocultivated with an overnight culture of Agrobacterium tumefaciens C58C1 pMP90 (McKersie et al., 1999 Plant Physiol 119: 839-847) or LBA4404 containing the expression vector. The explants are cocultivated for 3 d in the dark on SH induction medium containing 288 mg/L Pro, 53 mg/L thioproline, 4.35 g/L K2S04, and 100 μm acetosyringinone. The explants are washed in half-strength Murashige-Skoog medium (Murashige and Skoog, 1962) and plated on the same SH induction medium without acetosyringinone but with a suitable selection agent and suitable antibiotic to inhibit Agrobacterium growth. After several weeks, somatic embryos are transferred to BOi2Y development medium containing no growth regulators, no antibiotics, and 50 g/L sucrose. Somatic embryos are subsequently germinated on half-strength Murashige-Skoog medium. Rooted seedlings were transplanted into pots and grown in a greenhouse. T1 seeds are produced from plants that exhibit tolerance to the selection agent and that contain a single copy of the T-DNA insert.

### Example 22

### Phenotypic Evaluation Procedure

### 22.1 Evaluation Setup

[0494] Approximately 35 independent T0 rice transformants were generated. The primary transformants were transferred from a tissue culture chamber to a greenhouse for growing and harvest of T1 seed. Six events, of which the T1 progeny segregated 3:1 for presence/absence of the transgene, were retained. For each of these events, approximately 10 T1 seedlings containing the transgene (hetero- and homo-zygotes) and approximately 10 T1 seedlings lacking the transgene (nullizygotes) were selected by monitoring visual marker expression. The transgenic plants and the corresponding nullizygotes were grown side-by-side at random positions. Greenhouse conditions were of shorts days (12 hours light), 28° C. in the light and 22° C. in the dark, and a relative humidity of 70%.

[0495] Four T1 events were further evaluated in the T2 generation following the same evaluation procedure as for the T1 generation but with more individuals per event. From the stage of sowing until the stage of maturity the plants were passed several times through a digital imaging cabinet. At each time point digital images (2048×1536 pixels, 16 million colours) were taken of each plant from at least 6 different angles.

### 22.2 Statistical Analysis: F-Test

[0496] A two factor ANOVA (analysis of variants) was used as a statistical model for the overall evaluation of plant phenotypic characteristics. An F-test was carried out on all the parameters measured of all the plants of all the events transformed with the gene of the present invention. The F-test was carried out to check for an effect of the gene over all the transformation events and to verify for an overall effect of the gene, also known as a global gene effect. The threshold for significance for a true global gene effect was set at a 5% probability level for the F-test. A significant F-test value points to a gene effect, meaning that it is not only the mere presence or position of the gene that is causing the differences in phenotype.

### 22.3 Parameters Measured

### Biomass-Related Parameter Measurement

[0497] From the stage of sowing until the stage of maturity the plants were passed several times through a digital imaging cabinet. At each time point digital images (2048×1536 pixels, 16 million colours) were taken of each plant from at least 6 different angles.

[0498] The plant aboveground area (or leafy biomass) was determined by counting the total number of pixels on the digital images from aboveground plant parts discriminated from the background. This value was averaged for the pictures taken on the same time point from the different angles and was converted to a physical surface value expressed in square mm by calibration. Experiments show that the aboveground plant area measured this way correlates with the biomass of plant parts above ground. The above ground area is the area measured at the time point at which the plant had reached its maximal leafy biomass. The early vigour is the plant (seedling) aboveground area three weeks post-germination. Increase in root biomass is expressed as an increase in total root biomass (measured as maximum biomass of roots observed during the lifespan of a plant); or as an increase in the root/shoot index (measured as the ratio between root mass and shoot mass in the period of active growth of root and shoot).

### Seed-Related Parameter Measurements

[0499] The mature primary panicles were harvested, counted, bagged, barcode-labelled and then dried for three days in an oven at 37° C. The panicles were then threshed and all the seeds were collected and counted. The filled husks were separated from the empty ones using an air-blowing device. The empty husks were discarded and the remaining fraction was counted again. The filled husks were weighed on an analytical balance. The number of filled seeds was determined by counting the number of filled husks that remained after the separation step. The total seed yield was measured by weighing all filled husks harvested from a plant. Total seed number per plant was measured by counting the number of husks harvested from a plant. Thousand Kernel Weight (TKW) is extrapolated from the number of filled seeds counted and their total weight. The Harvest Index (HI) in the present invention is defined as the ratio between the total seed yield and the above ground area (mm²), multiplied by a factor 10⁶. The total number of flowers per panicle as defined in the present invention is the ratio between the total number of seeds and the number of mature primary panicles. The seed fill rate as defined in the present invention is the proportion (expressed as a %) of the number of filled seeds over the total number of seeds (or florets).

### Example 23

### Results of the Phenotypic Evaluation of the Transgenic Plants

[0500] The results of the evaluation of transgenic rice plants expressing an AP2-70 nucleic acid are presented below. The percentage difference between the transgenics and the corresponding nullizygotes is also shown.

TABLE 19

| | | |
|---|---|---|
| Trait | Positive events | Average difference |

results of expression of pGOS2::AP2-70

| | | |
|---|---|---|
| Root Shoot Index | 3 events | 21.3% |
| | | overall +14% |
| Total Seed Yield | 2 events | 27% |
| Fill rate | 3 events | 27% |
| TKW | 4 events | 8.75% |
| | | overall +6% |
| Harvest Index | 4 events | 30.5% |
| | | overall +16% |
| Root thick | 2 events | 10.5% |
| Height | 2 events | 8% |
| | | overall +4% |

results of expression of pRCc3::AP2-70

| | | |
|---|---|---|
| Area max | 2 events | 16.5% |
| | | Overall +7% |
| Total seed yield | 2 events | 233% |
| | | Overall +89% |
| Number filled seed | 2 events | 184.5% |
| | | Overall +68% |
| Fill rate | 2 events | 206% |
| | | Overall +87% |
| Harvest Index | 2 events | 238.5% |
| | | Overall +86% |
| TKW | 3 events | 11.3% |
| | | Overall +7% |
| Height | 2 events | 12.5% |
| | | Overall +7% |

1. A method for enhancing yield-related traits in plants, comprising modulating expression in a plant of a nucleic acid encoding a NAC transcription factor, wherein the amino acid sequence of said NAC transcription factor, when used in the construction of a NAC phylogenetic tree, such as the one depicted in FIG. 1, tends to cluster with the group of NACs comprising the amino acid sequence represented by SEQ ID NO: 2, rather than with any other NAC group.

2-82. (canceled)

The application's sequence listing, which the Patent Office published only in electronic form, follows.

SEQUENCE LISTING (364 sequences)

SEQ ID NO: 1 - DNA, 1753 bp, Oryza sativa
atccagatgcgcttgcacttgcacttgcatgcagttcattgctctagctataggctatagctactatacactcatgagaatctgagattgggctgaaaattgatgagcatcgatctgaagaagacatatatatagctgatgatgatatagctttttctgcatatgcttgttttgatctgcagccaatcgatcgaggcatagagagtcaccaggcaatcaaattccaaccatccatcagctagatatatatacagcaaagatcacgatactcctagctagctagctagaagaattgatcggtcgatcggaggaaatagcaatggatcggcatgaggaggaggcaggagagtctccatgtgtgccgccggggttcaggtttcacccgacggaggaggagctggtgggctactacctcgccaggaaggtggcctcccagaagatcgatctcgacatcatccaggagctcgatctctacaggatcgagccatgggatctgcaagagcgttgcaagtacggtgggcatggcggcgatgagcagacggagtggtacttcttcagctacaaggaccgcaagtaccccagcgggacgaggaccaaccgcgccacggcggcgggcttctggaaggccaccggccgcgacaagccggtgctctcgtcgccgtcgacgagggtgatcgggatgaggaagacgctggtgttctacaagggtcgcgcccccaacggccggaagaccgactggatcatccacgagtaccgcctccaatcaaacgaacacgcccctactcaggaggaaggttgggtggtttgccgcgcgtttcagaagccgatgcccaaccagcagcagcacaggctgtcctacggctgcatccccggcagctacggcgccggagcctacgccgccgtccccgacaactacagcttgctgctgcaccacgacaaccctagcttcgccgggcggccattgatgagcgccgctgcctcagctctcttcgccaacaacaacaataacagcgtcgtcgaccacagcaacattctgagttcagagtccaagcttcacttctccgacatgatgccgcctctggagagccccaccatcgtcgacggcgagggctacgtctcgcaggctagcagctgcgtcgacgtcgatcagcaagccggcatcgtcgactggaacctgctcaccagcttgctgccgccgccggcgcatcagctcttccaccacctgccttccgcttctagctccaagaacagcaacaacatttcttcgtcaggcttcatcgatgaccgagactgatcgatcgatccagatcgattattatcaattgacaattcattcatcatatatatgcatgaattcttacaaatacgcacaattaaacgatcgagtgtactattaattagttgattactccgtctccatgatgtatacattaatttgaccactggccatcatcaggccatctgcatgcttactatctagcttatgtcagtacacggttgttagttcattcttaattaattagctactagtgtcagtgtgtgtatctatcggttgttcgtcttttgacctcattgctgagagaggtttgtaactgatgatgattaagttagctagcatttaattaggtgctatatatacacatatatatgcactatcactatatacatcatatatatgtatacatatatcgttgtctgcttaatgtgtacaccacctctctgcagtatatatagtattgatcaattaatttgt

SEQ ID NO: 2 - protein, 324 aa, Oryza sativa
MDRHEEEAGESPCVPPGFRFHPTEEELVGYYLARKVASQKIDLDIIQELDLYRIEPWDLQERCKYGGHGGDEQTEWYFFSYKDRKYPSGTRTNRATAAGFWKATGRDKPVLSSPSTRVIGMRKTLVFYKGRAPNGRKTDWIIHEYRLQSNEHAPTQEEGWVVCRAFQKPMPNQQQHRLSYGCIPGSYGAGAYAAVPDNYSLLLHHDNPSFAGRPLMSAAASALFANNNNNSVVDHSNILSSESKLHFSDMMPPLESPTIVDGEGYVSQASSCVDVDQQAGIVDWNLLTSLLPPPAHQLFHHLPSASSSKNSNNISSSGFIDDRD

SEQ ID NO: 3 - DNA, 1346 bp, Oryza sativa
aatttgcttctcatctttcttctctactcctctcaaatacaagagctcacactgctccctagcttccttcttcatcccttgaactagttgtcagctactgaccagcctgaagatagatgctagtttgtgtagagaattcgatcttctgaggcgtatggtgatcatggagtcatgtgtgcctcctgggtttaggttccaccccaccgacgaggagctcgtcggctactacctccggaagaaggtggcctcgcagaagatcgacctcgacgtcatccgcgacgtcgacctctaccgcatcgagccatgggatctccaagagcattgcaggatagggtacgaggagcagagcgagtggtacttcttcagctacaaggacaggaagtacccgacggggacgaggacgaacagggcgacgatgacggggttctggaaggcgacggggagggacaaggcggtgcgtgagaggagcaggctcatcgggatgaggaagacgctcgtcttctacaagggcagggcacccaacggccacaagaccgactggattgtccacgagtaccgcctcgagtccgacgagaacgccccgcctcaggaagaaggctgggtggtgtgccgcgcgttcaagaagcgaaccatgcagccgccgcggagctccatcggagcatgggaggcgagctactcctaccacgaccccgccgtcttcgtcggcggcggggaacacttcaagcaagaggccgcggccgagctggacggcgtcgccgccgccgccggagctaacgccttcctgcggtactccacccgcctggccgagctcccgcagctggagagcccgccgctgccaagccaggggagccaggcggcctcggccgtcgtcgacggcgaggaagataacgccgattctagcaggcgccctggcggcggcggcggcgccgccgccgcggtgaccacggactggagggcgttcgacaagttcgtcgcgtcccagctcagccccgaggagcagcacacctgccgggccaccgacgacgacgacatggcagcgctgctgctcctcgacggcggcgggcaggaggacgacgccgggaggtggctgggctccgccgggttgctgagcgccgtggcggccgacgcgacgacggactgcggcctcggcaccagctgcgtgcctggcgacatcaactgattcagggccaagccgatcgagctctcacttctccttagcataaagtgtgagatatctacgaattgtatggatggctatatatacgtacgcctatacatatgtagctggtcaaagcatcgtttcagtttcagtttcagttcttggaagtcaatggatgttgaccatt

SEQ ID NO: 4 - protein, 341 aa, Oryza sativa
MVIMESCVPPGFRFHPTDEELVGYYLRKKVASQKIDLDVIRDVDLYRIEPWDLQEHCRIGYEEQSEWYFFSYKDRKYPTGTRTNRATMTGFWKATGRDKAVRERSRLIGMRKTLVFYKGRAPNGHKTDWIVHEYRLESDENAPPQEEGWVVCRAFKKRTMQPPRSSIGAWEASYSYHDPAVFVGGGEHFKQEAAAELDGVAAAAGANAFLRYSTRLAELPQLESPPLPSQGSQAASAVVDGEEDNADSSRRPGGGGGAAAAVTTDWRAFDKFVASQLSPEEQHTCRATDDDDMAALLLLDGGGQEDDAGRWLGSAGLLSAVAADATTDCGLGTSCVPGDIN

SEQ ID NO: 5 - DNA, 1101 bp, Oryza sativa
atggaatcatgcgtccctcctgggttcaggttccaccccaccgacgaggagctcgtcggctactacctccgcaagaaggtcgcctcccagaagatcgacctcgacgtcatccgcgacatcgatctctaccgcatcgaaccctgggatctccaagaacattgtgggatcgggtacgatgagcaaagcgagtggtacttcttcagctacaaggacaggaagtacccgacggggacgaggacgaacagggcgacaatggcggggttctggaaggcgacggggagggacaaggcggtgcacgacaagagcaggctcatcggcatgaggaagacactcgtcttctataagggcagggcgcctaatggccagaagaccgactggatcatgcacgagtaccgcctcgagaccgacgagaacgcgccgccacaggaagaaggatgggtggtgtgccgagcattcaagaagaggacggcgtatccggcgaggagcatggtggagacgtgggactactccttgcacgagcgcaacatcatgagcgccgcggcggcggcggcgttcgccgatccgagcgcggcgtacgcgcagatgaggcggcagcacaggagcgggcggttcaagcaggaggcggagctggacggcgccgccacagccctcctccactactccagccacctcgccgagctgccgcagctcgagagcccctccgcggctgcggcgccgctccagcccaacccgagccagctggccaccgccggcgaggacgacgactgcaagggcgataatggcggtaggagggccaagaaagcccgcgccgccggcgacaaggtggcgacgaccacggactggagagcgctcgacaagttcgtcgcgtcgcagcttagccccggggagtgtggcagcatggaggcaacggcggaagccgcggcggcggcagtcgccggtgtgagctcgccgctggaccacggcgatgacgacatggcagcattgctgtttctcaacagcgacgagagagacgaggtcgacaggtggacggggttgctcggctccggcgccggcgcgagcggcgtcgacggcgacctcggaatctgtgtgtttgacaaatga

SEQ ID NO: 6 - protein, 366 aa, Oryza sativa
MESCVPPGFRFHPTDEELVGYYLRKKVASQKIDLDVIRDIDLYRIEPWDLQEHCGIGYDEQSEWYFFSYKDRKYPTGTRTNRATMAGFWKATGRDKAVHDKSRLIGMRKTLVFYKGRAPNGQKTDWIMHEYRLETDENAPPQEEGWVVCRAFKKRTAYPARSMVETWDYSLHERNIMSAAAAAAFADPSAAYAQMRRQHRSGRFKQEAELDGAATALLHYSSHLAELPQLESPSAAAAPLQPNPSQLATAGEDDDCKGDNGGRRAKKARAAGDKVATTTDWRALDKFVASQLSPGECGSMEATAEAAAAAVAGVSSPLDHGDDDMAALLFLNSDERDEVDRWTGLLGSGAGASGVDGDLGICVFDK

SEQ ID NO: 7 - DNA, 1113 bp, Oryza sativa
atggacactttctcccatgtgccacctggtttccgctttcaccctactgacgaggagctcgtcgattactacctgaggaagaaggtggcatcgaagaaaatcgacctcgacgttataaaagacgtcgacctgtacaaaatcgagccctgggatctccaagagaagtgcaagattggcatggaagaacagaatgactggtacttcttcagccacaaagacaaaaagtacccgacgggcacccgcaccaaccgggccacgggcgccggcttctggaaggcgacggggagggacaagcccatctacgcccgcagctgcctcgtcgggatgaggaagacactcgtcttctacaagggccgtgcccccaatggccagaagtcggactggatcatgcacgagtaccgcctcgagaccaacgaaaacggcaccacacctgaggaaggatgggtggtctgccgggtgttcaagaagcgggtggcgacggtgcggagaatggccgacggatcaccgtgctggttcgatgaccacggcgccgtcggtgcgttcatgccggacctcagctcgccgaggcagctactgccgcaccaccaccaccaccacccgggctcgtcggcggcgctgtaccacggccaccaccaccagcagctgcagcagatgtacggtcactgcaagccggagctggagtaccaccacctcctgccgcaggaggccttcctgcagcatcttcctcagctggagagccccaagccgccgccgccgcctcctgcggcggcggcctacattggcggccacctcggatcgtcgtcgtccaccgcccttactactcacgacgacgaagcctccggctccgccgcgcagcagcagccgccgtcgttggaggctgtttacatggccggcgccggcgtcggcatcggcgtcgacgcgtcggtgacggactggaggctactggacaagttcgtcgcgtctcagctgctcagcaaggagtccatgtccagctacggatcccatccggctcaggtgtttcaggctgcagacggtggcaagcatgaagaggctttggactacgcttcgacgtcggccggctccggcggcggcgaggctgatctgtggaaatag

SEQ ID NO: 8 - protein, 370 aa, Oryza sativa
MDTFSHVPPGFRFHPTDEELVDYYLRKKVASKKIDLDVIKDVDLYKIEPWDLQEKCKIGMEEQNDWYFFSHKDKKYPTGTRTNRATGAGFWKATGRDKPIYARSCLVGMRKTLVFYKGRAPNGQKSDWIMHEYRLETNENGTTPEEGWVVCRVFKKRVATVRRMADGSPCWFDDHGAVGAFMPDLSSPRQLLPHHHHHHPGSSAALYHGHHHQQLQQMYGHCKPELEYHHLLPQEAFLQHLPQLESPKPPPPPPAAAAYIGGHLGSSSSTALTTHDDEASGSAAQQQPPSLEAVYMAGAGVGIGVDASVTDWRLLDKFVASQLLSKESMSSYGSHPAQVFQAADGGKHEEALDYASTSAGSGGGEADLWK

SEQ ID NO: 9 - DNA, 1131 bp, Oryza sativa
atggaagtggaagcaaggatacacctcctgttgatcaagctagtcttctataggagtgcagaagagcgagaatcagcctctgttcatattaacttgctaccagttcgggagctatactttgatccgcggaagaagatggacgcattctcccatgtcccgccaggttttcgtttccaccctactgacgaggaactcgtggattactaccttaggaagaaggtagcactgaagaagatagacttggacgtcataaaagatattgatctgtacaaaattgagccttgggacctacaagaacaatgcaagattggaaacgaggagcagaacgagtggtacttcttcagccacaaggacaagaagtacccgacgggcacacgcaccaacagggcgaccactgccggcttttggaaggccaccgggagggacaagccgatctatgtcaagaactgccttgttgggatgaggaagacgttggttttctacaggggccgggctcccaacggacagaagtcggactggatcatgcacgagtatcgcttggagaccaacgaatacggagctccccaagaggaaggatgggtggtctgcagggtgttcaagaagcgagtcgcggcggtgcaaagggcggccggcgacggcggcgactcacctttctggttcaacgagcacgtcgcgttcatggcgccggcgccaggcctcgactcgccgtaccatggccaccgccagagccacccttgcaagctggaggtagagtatcaccaccacctccttcctcaggaggcggcgccgttcatgcacctcccaaggctggagagccccaagctaccggccgccgacatcattgtcgccaccgcagcgtcgtccgctctccagccgtgcggccacacgacggcgcagcagctgcagctgcagatcgagccggtctacgtgacggccgatgcgtcggcagcagattggagggatcttgacaagctggtggcgtctcagttcggccacggcgactcgactgcgaaggagcccagttactgcaatccggtgcaggtgtttcaggtcgaggggaagcaggaggatagcttggattacgtgtccacgtctgcctcctgcggaggggaggaggatttgtggaaatag

SEQ ID NO: 10 - protein, 376 aa, Oryza sativa
MEVEARIHLLLIKLVFYRSAEERESASVHINLLPVRELYFDPRKKMDAFSHVPPGFRFHPTDEELVDYYLRKKVALKKIDLDVIKDIDLYKIEPWDLQEQCKIGNEEQNEWYFFSHKDKKYPTGTRTNRATTAGFWKATGRDKPIYVKNCLVGMRKTLVFYRGRAPNGQKSDWIMHEYRLETNEYGAPQEEGWVVCRVFKKRVAAVQRAAGDGGDSPFWFNEHVAFMAPAPGLDSPYHGHRQSHPCKLEVEYHHHLLPQEAAPFMHLPRLESPKLPAADIIVATAASSALQPCGHTTAQQLQLQIEPVYVTADASAADWRDLDKLVASQFGHGDSTAKEPSYCNPVQVFQVEGKQEDSLDYVSTSASCGGEEDLWK

SEQ ID NO: 11 - DNA, 942 bp, Medicago truncatula
atgatggagtcatgtgtcccacctggatttcggttccacccaacggatggagagcttgttggttattatctaagaaagaaagtagcttctcacaagattgatcttgatgttatcaaagagatcgatctatatcgtattgaaccctgggatctccaagagagatgtagaattgggaatgaggagcaacatgagtggtatttttttagtcacaaagataagaaatatccaacagggacgagaacgaatagagctacaatggcagggttctggaaagcaaccggaagagataagtcggtgtatgaacgaacaaaactgattggaatgaggaagacactcgttttctacaaaggaagagcacctaatggacagaaaactgattggatcatgcatgaatataggcttgaaacagttgaaaatgcacctccacaggcaagtgaagaaggttgggttgtgtgcaaagcattcaagaaaaaaacaagtgtccaagcaaaaacaaatgaaagatgggatccaagccacttacatgatgaacaaacaagtagcatcatctcaagggtggaccctattgacctcatcttaagacaaccacagaggatttcagctcaaaatttcatgtacaaacaagagatagaagcagaagcagataccttattaaggttcatgcattcagaacaattggtacctcttcctcaactacaaagtccctctttaacaaagaggcaaaactcaatgccaataatatcagagaaagtgactgattggagggatcttgacaagtttgtggcttctcagttgagtcaagaagatcataggcatgaaacaagctcagacatgtcattgttcctacttcagagtagtaaggatgatgaagagaacaagttaagctcatttttaactacaaggtcagattgtgacattggaatatgtgtatttgaaaattaa

SEQ ID NO: 12 - protein, 313 aa, Medicago truncatula
MMESCVPPGFRFHPTDGELVGYYLRKKVASHKIDLDVIKEIDLYRIEPWDLQERCRIGNEEQHEWYFFSHKDKKYPTGTRTNRATMAGFWKATGRDKSVYERTKLIGMRKTLVFYKGRAPNGQKTDWIMHEYRLETVENAPPQASEEGWVVCKAFKKKTSVQAKTNERWDPSHLHDEQTSSIISRVDPIDLILRQPQRISAQNFMYKQEIEAEADTLLRFMHSEQLVPLPQLQSPSLTKRQNSMPIISEKVTDWRDLDKFVASQLSQEDHRHETSSDMSLFLLQSSKDDEENKLSSFLTTRSDCDIGICVFEN

SEQ ID NO: 13 - DNA, 1414 bp, Arabidopsis thaliana
atgaattcattttcccacgtccctccgggttttagatttcacccgacagatgaagaacttgtagactactacctgaggaaaaaagtcgcatcgaagagaatagaaattgatttcataaaggacattgatctttacaagattgagccatgggaccttcaagagttgtgcaaaattgggcatgaagagcagagtgattggtacttctttagccataaagacaagaagtatcccacagggactcgaaccaatagagcaacaaaagcagggttttggaaagccaccggaagagataaggctatctatttgaggcatagtctaattggcatgaggaaaacacttgtgttttacaagggaagagccccaaatggacaaaagtctgattggatcatgcacgaataccgcttagaaaccgatgaaaacggaactcctcaggaagaaggatgggttgtgtgtagggttttcaagaagagattggctgcagttagacgaatgggagattacgactcatccccttcacattggtacgatgatcaactttcttttatggcctccgagctcgagacaaacggtcaacgacggattctccccaatcatcatcagcagcagcagcacgagcaccaacaacatatgccatatggcctcaatgcatctgcttacgctctcaacaaccctaacttgcaatgcaagcaagagctagaactacactacaaccacctggtacaacgaaatcatcttcttgatgaatctcatttatcgttcctccaacttcctcaactagaaagccctaagattcaacaagataacagtaattgcaactctcttccttatggaacaagcaacatcgataataactcgagccataatgctaacttgcagcaatcaaatatcgcgcatgaggaacaattgaatcaaggaaatcagaacttcagctctctatacatgaacagcggcaacgagcaagtgatggaccaagtcacagactggagagttctcgataaatttgttgcttctcagctaagcaacgaggaggctgccacagcttctgcatctatacagaataatgccaaggacacaagcaatgctgagtaccaagttgatgaagaaaaagatccgaaaagggcttcagacatgggagaagaatatactgcttctacttcttcgagttgtcagattgatctatggaagtgagctgaaagagaagacatataaatgcatatatacatatatatatatacgtacacacgaacactaatcaagtgtagatgatgatgatggtacagatttatatttgctttgattgattcttactacattattgaacttatgtcatatgcatatatacattgcgtatctatgcatatttatacttgtactcaatatgattaaccatatataaactctaatctaaatgtaa

SEQ ID NO: 14 - protein, 395 aa, Arabidopsis thaliana
MNSFSHVPPGFRFHPTDEELVDYYLRKKVASKRIEIDFIKDIDLYKIEPWDLQELCKIGHEEQSDWYFFSHKDKKYPTGTRTNRATKAGFWKATGRDKAIYLRHSLIGMRKTLVFYKGRAPNGQKSDWIMHEYRLETDENGTPQEEGWVVCRVFKKRLAAVRRMGDYDSSPSHWYDDQLSFMASELETNGQRRILPNHHQQQQHEHQQHMPYGLNASAYALNNPNLQCKQELELHYNHLVQRNHLLDESHLSFLQLPQLESPKIQQDNSNCNSLPYGTSNIDNNSSHNANLQQSNIAHEEQLNQGNQNFSSLYMNSGNEQVMDQVTDWRVLDKFVASQLSNEEAATASASIQNNAKDTSNAEYQVDEEKDPKRASDMGEEYTASTSSSCQIDLWK

SEQ ID NO: 15 - DNA, 1185 bp, Arabidopsis thaliana
atgaattcgttttcacaagtacctcctggcttcagatttcatcctactgatgaagaacttgtagactactacttgaggaaaaaagttgcatcaaagagaatagaaatcgatatcatcaaggatgttgatctttacaagattgagccatgtgatcttcaagagttatgcaagataggaaacgaagagcagagcgaatggtacttctttagtcataaagacaagaagtatcccacgggaactcgaaccaatagagccacgaaagcaggattttggaaagccactggaagagacaaggctatatatataagacatagtcttatcggtatgaggaaaacacttgtgttttacaaaggaagagccccaaatggtcagaaatccgattggatcatgcacgaatatcgcttagaaacaagtgaaaatggaacccctcaggaagaaggatgggtagtatgtagggtattcaagaagaaattggcagcgacagtgaggaaaatgggagattaccattcatcaccatcgcagcattggtacgatgatcagctctcttttatggcctccgagatcatttctagttctccacgacagtttcttcccaatcatcattataaccgccaccatcaccagcagacattgccttgtggcctcaatgcattcaacaacaacaatcctaacttgcaatgcaagcaagagctcgagttacattacaatcaaatggtacaacatcaacaacaaaaccatcatcttcgtgaatctatgtttctccagcttcctcagctcgaaagccctaccagtaattgcaattctgacaacaacaataacacaagaaatattagtaacttgcagaaatcatcaaatatatctcatgaggaacaattgcaacaagggaatcaaagtttcagctctctgtattacgatcaaggagtagagcaaatgactactgactggagagttctcgataaatttgttgcttcacagcttagcaatgatgaagaggctgcagccgtggtttcttcttcttctcatcaaaacaacgtcaagattgacacgagaaacacgggttatcatgtgatagatgagggaataaatttgccggagaatgattctgaaagggttgttgaaatgggagaagagtattcaaatgctcatgctgcttctacttcttcaagttgtcagattgatctctag

SEQ ID NO: 16 - protein, 394 aa, Arabidopsis thaliana
MNSFSQVPPGFRFHPTDEELVDYYLRKKVASKRIEIDIIKDVDLYKIEPCDLQELCKIGNEEQSEWYFFSHKDKKYPTGTRTNRATKAGFWKATGRDKAIYIRHSLIGMRKTLVFYKGRAPNGQKSDWIMHEYRLETSENGTPQEEGWVVCRVFKKKLAATVRKMGDYHSSPSQHWYDDQLSFMASEIISSSPRQFLPNHHYNRHHHQQTLPCGLNAFNNNNPNLQCKQELELHYNQMVQHQQQNHHLRESMFLQLPQLESPTSNCNSDNNNNTRNISNLQKSSNISHEEQLQQGNQSFSSLYYDQGVEQMTTDWRVLDKFVASQLSNDEEAAAVVSSSSHQNNVKIDTRNTGYHVIDEGINLPENDSERVVEMGEEYSNAHAASTSSSCQIDL

SEQ ID NO: 17 - DNA, 1095 bp, Oryza sativa
atggatggatctagtatgagcagcagcagcacgcagcagcaggcgcaggttcctcctggatttcgtttccacccgacggacgaagagctggtggattactaccttcggaagaaggtggccgcaagaaggattgatctcaatgtcatcaaggacgtcgatctctacaagattgagccatgggatctgcaagagcgttgccggatcaatggcgggtcggcggcggaggagcagaacgaatggtacttcttcagccacaaggacaagaagtacccgacggggacgaggaccaaccgtgcgacggcggccgggttctggaaggcgacggggcgagacaagcccatctacgccaccaagcagcacagcctcctcgtgggcatgaggaagacgctcgtctactaccgcggccgcgcccccaacggccacaagtccgactggatcatgcacgagtaccgcctcgagaccaccgagacggccccgccgcaggaagaagggtgggtggtatgccgggtgttcaagaagagattacccacaacaagaagagattcagaccatgacgcaccttgcggcagctggtacgttgatgaagatgcaccgggcgccttcatgtctccgatgatgatcaccagatcatcaatattgcgcccacaccaacaccacgccggcatcacgctgcaagagcaacacctccacaccacttacaagcacagagacctcactactaagattcagcagctccaagtccctgcggcaggccatcatctcctcaacaccatgccccatgacctggagagttctacttcctccttccattctcttttggtctcacctgatcaccaccaaatcaacatgcaccatgctcaggctgatcccttctttgacgacatgcatgcagtcgatcaagccactaccactgactggagagttcttgacaagtttgttgcctctcagcttagcaatgatgctacaaacaagcctgcggatcattatactgatgaaggagacattcttcaggtcagtgacaagcagcaagaggtggcagccgccgattatgcgtccacatcaacgtcaagcagccaaattgatccatggaagtga

SEQ ID NO: 18 - protein, 364 aa, Oryza sativa
MDGSSMSSSSTQQQAQVPPGFRFHPTDEELVDYYLRKKVAARRIDLNVIKDVDLYKIEPWDLQERCRINGGSAAEEQNEWYFFSHKDKKYPTGTRTNRATAAGFWKATGRDKPIYATKQHSLLVGMRKTLVYYRGRAPNGHKSDWIMHEYRLETTETAPPQEEGWVVCRVFKKRLPTTRRDSDHDAPCGSWYVDEDAPGAFMSPMMITRSSILRPHQHHAGITLQEQHLHTTYKHRDLTTKIQQLQVPAAGHHLLNTMPHDLESSTSSFHSLLVSPDHHQINMHHAQADPFFDDMHAVDQATTTDWRVLDKFVASQLSNDATNKPADHYTDEGDILQVSDKQQEVAAADYASTSTSSSQIDPWK

SEQ ID NO: 19 - DNA, 1098 bp, Arabidopsis thaliana
atggagccaatggaatcttgtagcgttcctccaggatttaggttccatccgacggacgaagagcttgtcgggtactatctaaggaagaaaatcgcatcgcaaaagattgatctcgacgtcatcagagacatcgatctctacagaatagaaccatgggatctacaagaacaatgtcgaatcggttatgaggaacaaaatgaatggtatttttttagtcacaaggacaagaaatatccaacggggacaagaactaatagagcgaccatggctggattttggaaagccacgggaagagacaaagctgtttacgacaaaacaaaactaattggtatgaggaaaacacttgtgttctacaaaggacgtgcacctaatggcaagaaatccgattggatcatgcatgagtaccggctcgagtcagatgagaatgcaccgccccaggaagaaggatgggtggtttgtagagcattcaaaaaaagagctacagggcaagccaagaacacggaaacttggagctcaagttacttttacgatgaagttgcaccgaatggagttaactcggttatggaccccattgattacatatctaagcagcaacataacatttttgggaaaggtttgatgtgtaagcaagaactagaaggaatggttgatggtataaactatatacaatcgaatcaattcattcagctcccacaactccaaagcccttctctcccgctgatgaaaagaccttcaagctcgatgtccataacatcaatggataacaattacaactataaactcccattagcggatgaagaaagcttcgagtcattcataagaggagaggatagaaggaagaagaaaaagcaagtaatgatgacgggaaattggagagagttagacaagtttgttgcttcacaacttatgagccaagaagacaatggaacttcaagtttcgcaggtcatcatatagttaatgaagataaaaacaacaatgatgtggagatggattcgtcaatgtttttgagcgaaagagaagaagaaaacaggttcgtcagtgaattcttgagtacaaactcggattatgatattgggatttgcgtatttgataattga

SEQ ID NO: 20 - protein, 365 aa, Arabidopsis thaliana
MEPMESCSVPPGFRFHPTDEELVGYYLRKKIASQKIDLDVIRDIDLYRIEPWDLQEQCRIGYEEQNEWYFFSHKDKKYPTGTRTNRATMAGFWKATGRDKAVYDKTKLIGMRKTLVFYKGRAPNGKKSDWIMHEYRLESDENAPPQEEGWVVCRAFKKRATGQAKNTETWSSSYFYDEVAPNGVNSVMDPIDYISKQQHNIFGKGLMCKQELEGMVDGINYIQSNQFIQLPQLQSPSLPLMKRPSSSMSITSMDNNYNYKLPLADEESFESFIRGEDRRKKKKQVMMTGNWRELDKFVASQLMSQEDNGTSSFAGHHIVNEDKNNNDVEMDSSMFLSEREEENRFVSEFLSTNSDYDIGICVFDN

SEQ ID NO: 21 - DNA, 1465 bp, Arabidopsis thaliana
ctttctcttcacattcaccgaaacttataaccaagatcaatatcagttctctctctcgatgaacatcatcttctacacagccatctttctttgacttcttcttcttcttcttaatataacggctcgtttcttttgtttccaaacgagtaaatagtgtcctatacacatatctataattccacaggttgaagaaaagaaataatggaatcggtggatcaatcatgtagtgttcctccgggattcagattccatccaacagatgaagagctcgttggttactatttaaggaaaaaagttgcatcgcaaaagatcgatcttgatgtcataagagatattgatctctacagaatcgaaccatgggatttacaagagagctgccgaatcggatatgaggaaagaaatgaatggtatttcttcagccacaaagataagaaatatccaacaggaacaagaacaaacagagcgaccatggctgggttttggaaagccacgggccgagacaaggctgtttacgacaagtcaaaactgattggtatgagaaaaacacttgtgttctacaaaggaagagcccctaatggccaaaaaaccgattggatcatgcatgaataccggctagagtcagatgagaatgcacctcctcaggaagaagggtgggtggtttgtagagcgttcaagaaaaagccaatgaccgggcaagccaagaacacagaaacttggagctcaagttacttttacgacgaattaccgagtggagtacgctcagttacggagcctcttaactacgtatctaagcagaaacaaaacgtttttgcacaagatttaatgttcaagcaagaactagaaggatcagatatcggtttaaacttcatccactgcgatcaattcattcaacttccgcagcttgaaagcccttcactccctcttaccaaaagaccagtgagcttgacgtcaattacatcattggagaagaataaaaatatctacaaaagacatttaatagaagaggatgtgagcttcaatgcgctaataagtagtggaaataaagataagaagaagaagaaaacatcagtgatgacgacggattggagagcactcgataaatttgttgcttctcaacttatgagccaagaagatggagtttcgggttttggaggtcatcatgaagaagataacaataaaatcggtcattacaataacgaagagagcaataacaagggatcagtagagactgcttcttccacgttattgagtgatagagaagaagagaacagattcatcagtggattattgtgttccaacttggactatgacttatatagggatttacatgtttgataaaagataacactataatatggtgcgtaacgtttgctatataggtacgtagaatttattgatacagtataacatatataaagatgtgtgaaagatttgttttcttctactatatatactttttcgtgaa

SEQ ID NO: 22 - protein, 377 aa, Arabidopsis thaliana
MESVDQSCSVPPGFRFHPTDEELVGYYLRKKVASQKIDLDVIRDIDLYRIEPWDLQESCRIGYEERNEWYFFSHKDKKYPTGTRTNRATMAGFWKATGRDKAVYDKSKLIGMRKTLVFYKGRAPNGQKTDWIMHEYRLESDENAPPQEEGWVVCRAFKKKPMTGQAKNTETWSSSYFYDELPSGVRSVTEPLNYVSKQKQNVFAQDLMFKQELEGSDIGLNFIHCDQFIQLPQLESPSLPLTKRPVSLTSITSLEKNKNIYKRHLIEEDVSFNALISSGNKDKKKKKTSVMTTDWRALDKFVASQLMSQEDGVSGFGGHHEEDNNKIGHYNNEESNNKGSVETASSTLLSDREEENRFISGLLCSNLDYDLYRDLHV

SEQ ID NO: 23 - DNA, 1101 bp, Oryza sativa; identical to SEQ ID NO: 5

SEQ ID NO: 24 - protein, 366 aa, Oryza sativa; identical to SEQ ID NO: 6

SEQ ID NO: 25 - DNA, 1047 bp, Arabidopsis thaliana
atggaaagtctcgcacacattcctcccggttatcgattccatccgaccgatgaagaactcgttgactattatctcaagaacaaagttgcattcccgggaatgcaagttgatgttatcaaagatgttgatctctacaaaatcgagccatgggacatccaagagttatgtggaagagggacaggagaagagagggaatggtatttctttagccacaaggacaagaaatatccaactgggacacgaaccaatagagcaacgggctccggattttggaaagcaacgggtcgagacaaggccatttactcaaagcaagagcttgttgggatgaggaagactcttgtcttttacaaaggtagggccccaaatggtcagaaatctgattggataatgcacgaataccgtcttgagaccgatgaaaatggaccgcctcatgaggaaggatgggtggtttgtcgcgctttcaagaagaagctaaccacgatgaactacaacaatccaagaacaatgatgggatcatcatcaggccaagaatctaactggttcacgcagcaaatggatgtggggaatggtaattactatcatcttcctgatctagagagtccgagaatgtttcaaggctcatcatcatcatcactatcatcattacatcagaatgatcaagacccttatggtgtcgtactcagcactattaacgcaaccccaactacaataatgcaacgagatgatggtcatgtgattaccaatgatgatgatcatatgatcatgatgaacacaagtactggtgatcatcatcaatcaggattactagtcaatgatgatcataatgatcaagtaatggattggcaaacgcttgacaagtttgttgcttctcagctaatcatgagccaagaagaggaagaagttaacaaagatccatcagataattcttcgaatgaaacatttcatcatctctctgaagagcaagctgcaacaatggtttcgatgaatgcttcttcctcttcttctccatgttccttctactcttgggctcaaaatacacacacgtaa

SEQ ID NO: 26 - protein, 348 aa, Arabidopsis thaliana
MESLAHIPPGYRFHPTDEELVDYYLKNKVAFPGMQVDVIKDVDLYKIEPWDIQELCGRGTGEEREWYFFSHKDKKYPTGTRTNRATGSGFWKATGRDKAIYSKQELVGMRKTLVFYKGRAPNGQKSDWIMHEYRLETDENGPPHEEGWVVCRAFKKKLTTMNYNNPRTMMGSSSGQESNWFTQQMDVGNGNYYHLPDLESPRMFQGSSSSSLSSLHQNDQDPYGVVLSTINATPTTIMQRDDGHVITNDDDHMIMMNTSTGDHHQSGLLVNDDHNDQVMDWQTLDKFVASQLIMSQEEEEVNKDPSDNSSNETFHHLSEEQAATMVSMNASSSSSPCSFYSWAQNTHT

SEQ ID NO: 27 - DNA, 879 bp, Arabidopsis thaliana
atgatgaaggttgatcaagattattcgtgtagtataccgcctggatttaggtttcatccgacagatgaagaacttgtcggatattatctcaagaagaaaatcgcctcccagaggattgatctcgacgttatcagagaaattgatctttacaagatcgaaccatgggatctacaagagagatgtaggatagggtacgaggagcaaacggagtggtatttcttcagccatagagacaagaagtatccgactgggactaggacaaaccgagccaccgtggccggtttctggaaagcaacgggccgggacaaggcggtttacctcaactccaaacttatcggtatgagaaaaacgcttgtcttttaccgaggtcgagcgcctaatggccaaaagtccgattggatcattcacgaatactacagcctcgagtcacaccagaactctcctccacaggaagaaggatgggtagtgtgtagagcatttaagaaacgaacgaccatcccaacaaaaaggaggcaactttgggatccgaactgcttattctacgacgacgccactctcttggaacctctcgacaagcgagccagacataatcctgattttaccgccacaccgttcaagcaagaactactctccgaggccagtcacgtccaggatggagatttcggatctatgtaccttcaatgcatcgatgatgatcaattctcccagcttcctcagctcgagagcccctctcttccgtcggaaataactccccatagtactactttttctgagaacagtagccggaaagatgacatgagctccgagaagaggatcactgactggagatatctagataagttcgtggcgtctcaatttttgatgagtggagaagactaa

SEQ ID NO: 28 - protein, 292 aa, Arabidopsis thaliana
MMKVDQDYSCSIPPGFRFHPTDEELVGYYLKKKIASQRIDLDVIREIDLYKIEPWDLQERCRIGYEEQTEWYFFSHRDKKYPTGTRTNRATVAGFWKATGRDKAVYLNSKLIGMRKTLVFYRGRAPNGQKSDWIIHEYYSLESHQNSPPQEEGWVVCRAFKKRTTIPTKRRQLWDPNCLFYDDATLLEPLDKRARHNPDFTATPFKQELLSEASHVQDGDFGSMYLQCIDDDQFSQLPQLESPSLPSEITPHSTTFSENSSRKDDMSSEKRITDWRYLDKFVASQFLMSGED

SEQ ID NO: 29 - DNA, 927 bp, Oryza sativa
ccatcttaattttttacttctttacttaattatctgtcctactatatatgttaattcatggatattaatatggaatatggatgcaggaggaaggttgggtggtttgccgcgcgtttcagaagccgatgcccaaccagcagcagcacaggctgtcctacggctgcatccccggcagctacggcgccggagcctacgccgccgtccccgacaactacagcttgctgctgcaccacgacaaccctagcttcgccgggcggccattgatgagcgccgctgcctcagctctcttcgccaacaacaacaataacagcgtcgtcgaccacagcaacattctgagttcagagtccaagcttcacttctccgacatgatgccgcctctggagagccccaccatcgtcgacggcgagggctacgtctcgcaggctagcagctgcgtcgacgtcgatcagcaagccggcatcgtcgactggaacctgctcaccagcttgctgccgccgccggcgcatcagctcttccaccacctgccttccgcttcgggagttattacaagtagagtgagaggagacggcgcggcggcggcggcggcggcgggatggagagggagaaccgggtggagaccatctcccggctggcccagtggcgcatcgacaccttcggcccctcctcctaccgccgctccgattccttcaagatcggcatctggaactggttcccttcccaatcccaatcccccactactcagagatcaccgatttgccctatcaaatcaaatcatccgccaattcgatccgaatccgtgcaggtacctatcggtggagaaggctcgatatgtatacgtggggctgttcccggagcccgggcgggtggccaaggaacggcccccgctcgcccgcttccttctccgagcttgctggtccggccccaatg

SEQ ID NO: 30 - protein, 282 aa, Oryza sativa
MQEEGWVVCRAFQKPMPNQQQHRLSYGCIPGSYGAGAYAAVPDNYSLLLHHDNPSFAGRPLMSAAASALFANNNNNSVVDHSNILSSESKLHFSDMMPPLESPTIVDGEGYVSQASSCVDVDQQAGIVDWNLLTSLLPPPAHQLFHHLPSASGVITSRVRGDGAAAAAAAGWRGRTGWRPSPGWPSGASTPSAPPPTAAPIPSRSASGTGSLPNPNPPLLRDHRFALSNQIIRQFDPNPCRYLSVEKARYVYVGLFPEPGRVAKERPPLARFLLRACWSGPN

SEQ ID NO: 31 - DNA, 1168 bp, Arabidopsis thaliana
atcttgtttcttactcatttctctaacaattttccaaattaaatacgtttataggatcatcgtggatggataatataatgcaatcgtcaatgccaccgggattccgatttcatccgacagaggaagagcttgtgggttattacctagataggaagatcaattcaatgaagagtgctttagatgtcattgtagagattgatctctacaaaatggagccatgggatatacaagcgaggtgtaaactagggtatgaagagcaaaacgagtggtacttctttagtcataaggacaggaagtaccctaccgggactaggaccaaccgagccactgcggctgggttctggaaagccacgggtagagacaaggcggtactatcaaaaaacagtgtcatcggaatgcggaagacacttgtctactacaagggtcgagctcctaatggaagaaagtccgattggatcatgcacgaataccgtctccaaaactccgagcttgccccggttcaggaggaaggctgggtggtgtgtcgagcatttaggaagccaattccaaaccagaggccattagggtacgagccatggcagaaccagctctaccacgtcgaaagtagtaacaactactcatcttcagtgacaatgaacacgagtcatcatatcggtgcatcttcatcaagtcataaccttaatcaaatgctcatgagcaataaccactacaatcctaataatacatcctcatcgatgcatcaatatggcaacattgagctcccgcagttggacagcccgagcttgtcgcctagtttagggacgaataaagatcagaacgagagtttcgagcaagaagaagagaagagctttaactgtgtggattggagaacactagataccttgcttgagacacaagtcatacatccgcataaccctaatattcttatgttcgaaacgcagtcgtataatccggcgccaagcttcccttccatgcatcaaagctataatgaggtcgaagctaatattcatcattctcttggatgcttccctgactcgtaattaaaaaaaaacacacttctatatattgatttgtattctatgatttaattgttccatctggaaaataacatttataactgtctatttgtaaaagaagtttgtgtttattacgtagaaatttgttgttg

SEQ ID NO: 32 - protein, 324 aa, Arabidopsis thaliana
MDNIMQSSMPPGFRFHPTEEELVGYYLDRKINSMKSALDVIVEIDLYKMEPWDIQARCKLGYEEQNEWYFFSHKDRKYPTGTRTNRATAAGFWKATGRDKAVLSKNSVIGMRKTLVYYKGRAPNGRKSDWIMHEYRLQNSELAPVQEEGWVVCRAFRKPIPNQRPLGYEPWQNQLYHVESSNNYSSSVTMNTSHHIGASSSSHNLNQMLMSNNHYNPNNTSSSMHQYGNIELPQLDSPSLSPSLGTNKDQNESFEQEEEKSFNCVDWRTLDTLLETQVIHPHNPNILMFETQSYNPAPSFPSMHQSYNEVEANIHHSLGCFPDS

SEQ ID NO: 33 - DNA, 549 bp, Oryza sativa
atgcagccgccgcggagctccatcggagcatgggaggcgagctactcctaccacgaccccgccgtcttcgtcggcggcggggaacacttcaagcaagaggccgcggccgagctggacggcgtcgccgccgccgccggagctaacgccttcctgcggtactccacccgcctggccgagctcccgcagctggagagcccgccgctgccaagccaggggagccaggcggcctcggccgtcgtcgacggcgaggaagataacgccgattctagcaggcgccctggcggcggcggcggcgccgccgccgcggtgaccacggactggagggcgttcgacaagttcgtcgcgtcccagctcagccccgaggagcagcacacctgccgggccaccgacgacgacgacatggcagcgctgctgctcctcgacggcggcgggcaggaggacgacgccgggaggtggctgggctccgccgggttgctgagcgccgtggcggccgacgcgacgacggactgcggcctcggcaccagctgcgtgcctggcgacatcaactga

SEQ ID NO: 34 - protein, 182 aa, Oryza sativa
MQPPRSSIGAWEASYSYHDPAVFVGGGEHFKQEAAAELDGVAAAAGANAFLRYSTRLAELPQLESPPLPSQGSQAASAVVDGEEDNADSSRRPGGGGGAAAAVTTDWRAFDKFVASQLSPEEQHTCRATDDDDMAALLLLDGGGQEDDAGRWLGSAGLLSAVAADATTDCGLGTSCVPGDIN

SEQ ID NO: 35 - DNA, 1074 bp, Zinnia elegans
atggacacaatgaatcaatcatcatgtactgtccctccaggttttcgttttcatcctaccgatgaagaacttgttggttactatctcagaaagaaggttgcatctcaaaagattgatcttgatgtcattaaagacatcgatctttatcgaatcgaaccatgggatcttatagagagatgtcggatcggatacgaggagcaaaatgagtggtatttcttcagtcacaaggataaaaagtatccaacagggacaaggacaaatagggcaactatggcaggtttttggaaggcaacgggtagagacaaagctgtttacgaaaaactaaggctcataggaatgagaaaaaccctagttttctacaaaggaagggcaccaaatggccagaaaaccgattggatcatgcacgagtacaggctcgaatctgaagaaaatggacctcctcaggaagaaggatgggtagtatgtcgagcattcaagaaacgtgcaaccggacaaacaagaacaacaccagcatgggaatcaaattacttcttagatgaatcaagcctccttacatccacaatggatgattacaccacaattcaaccttcaaatattcctttgacatcaagtttcatgtgcaagcaagagttggaagcatcagaaaatttgaactttattcattgtgatcagtttattcaacttccacacctcgaaagcccatccctccaatcgataaaacggcctataagctccatactatatgaacatgatcaacaagaagacgatcaaatcacaaaaagaatcacaaacaacgttaggagtaaagatgaagtgagggattggagggatcttgataagtttgtagcttctcaattgagccaagaggaagagattcgatgtgtcgaagaagggttttcaacgaatttccaagagaacattgatcattctactagtttgagtcatatgtttaattatcaagatggtattgaagaatacagtggttgtgacaaagggggcaagttaaatggattcttgagttcaacaagctcagatcattttgatgttggaatttgcatatttgataaattatga

SEQ ID NO: 36 - protein, 357 aa, Zinnia elegans
MDTMNQSSCTVPPGFRFHPTDEELVGYYLRKKVASQKIDLDVIKDIDLYRIEPWDLIERCRIGYEEQNEWYFFSHKDKKYPTGTRTNRATMAGFWKATGRDKAVYEKLRLIGMRKTLVFYKGRAPNGQKTDWIMHEYRLESEENGPPQEEGWVVCRAFKKRATGQTRTTPAWESNYFLDESSLLTSTMDDYTTIQPSNIPLTSSFMCKQELEASENLNFIHCDQFIQLPHLESPSLQSIKRPISSILYEHDQQEDDQITKRITNNVRSKDEVRDWRDLDKFVASQLSQEEEIRCVEEGFSTNFQENIDHSTSLSHMFNYQDGIEEYSGCDKGGKLNGFLSSTSSDHFDVGICIFDKL

SEQ ID NO: 37 - DNA, 1283 bp, Zea mays
atgcatccaggtgttggaccattgtcggtgccaccaggcttccgcttccatccgactgatgaggagctcctctactactacctgaggaaaaaggttgcttatgagcccatagatcttgatgtcataagggagattgatctcaataagcttgagccctgggatctcaaagaaagatgcaaaataggcactgggcctcaaaacgagtggtacttcttcagccacaaggacaagaagtactcaacgggaacgagaacgaaccgtgccacgacggcgggattctggaaggcgactggccgagacaaggccatcttccttggcagcgccaggaggatcggcttgagaaagaccctggtgttctatatcggcagggcgccgcacgggaagaagactgagtggatcatgcacgagtaccgccttgatgaagagaacgttgaaattcaggaagatggatgggtggtatgtagggttttcaagaagaagaactatgagcagagaggccacaacatggctgagatggcggcactggacgacgatgagctccagcctttcacggttcctgtcgtccctgctggcactagctccctgccaacaacagaccacaagaacaaccctcacctcatgcaatatgacttcccttctttcgacccttccatgcagctcccacagctgatgagcgccgaccagcccgtgccaaccctattccccagccatcctggcgtcgccacggccatgagctcatcaatcgacgttgagtgctcgcagaacctgctgacgatgctgacatccaacggcagcgacgggatgctccacgtccgcgctggtggtgctggagctggtgtcgaccgcttcgctggcacgacagattggtcgatcctagacaagctcctcgcctcgcaccagaacctcggacagctcttccacggcaaggtcaccgcagcatctgcctccccaatggctccataccatcagcagctcatggaactcgggtggctcgtcgtcgtcgtcgtccttgcagaggcttccactgcagtacctcagcggcgagacgaccgatctcctcaggttccccaagtaattattggatcgacctcaagtttagctaccttgttgagcagtgaccatatcaggattttggttgactactaggctgcttaattcggcctacttcgtatggagtttagtgcttttaaatgtatatatggtgcaactgtttggggcatgcaggcatggaatgccatcgatctaccatggttgcttgcttggccaaaaaaaaaaaaaaaaaa

SEQ ID NO: 38 - protein, 381 aa, Zea mays
MHPGVGPLSVPPGFRFHPTDEELLYYYLRKKVAYEPIDLDVIREIDLNKLEPWDLKERCKIGTGPQNEWYFFSHKDKKYSTGTRTNRATTAGFWKATGRDKAIFLGSARRIGLRKTLVFYIGRAPHGKKTEWIMHEYRLDEENVEIQEDGWVVCRVFKKKNYEQRGHNMAEMAALDDDELQPFTVPVVPAGTSSLPTTDHKNNPHLMQYDFPSFDPSMQLPQLMSADQPVPTLFPSHPGVATAMSSSIDVECSQNLLTMLTSNGSDGMLHVRAGGAGAGVDRFAGTTDWSILDKLLASHQNLGQLFHGKVTAASASPMAPYHQQLMELGWLVVVVVLAEASTAVPQRRDDRSPQVPQVIIGSTSSLATLLSSDHIRILVDY

SEQ ID NO: 39 - DNA, 2193 bp, Oryza sativa
aatccgaaaagtttctgcaccgttttcaccccctaactaacaatatagggaacgtgtgctaaatataaaatgagaccttatatatgtagcgctgataactagaactatgcaagaaaaactcatccacctactttagtggcaatcgggctaaataaaaaagagtcgctacactagtttcgttttccttagtaattaagtgggaaaatgaaatcattattgcttagaatatacgttcacatctctgtcatgaagttaaattattcgaggtagccataattgtcatcaaactcttcttgaataaaaaaatctttctagctgaactcaatgggtaaagagagagattttttttaaaaaaatagaatgaagatattctgaacgtattggcaaagatttaaacatataattatataattttatagtttgtgcattcgtcatatcgcacatcattaaggacatgtcttactccatcccaatttttatttagtaattaaagacaattgacttatttttattatttatcttttttcgattagatgcaaggtacttacgcacacactttgtgctcatgtgcatgtgtgagtgcacctcctcaatacacgttcaactagcaacacatctctaatatcactcgcctatttaatacatttaggtagcaatatctgaattcaagcactccaccatcaccagaccacttttaataatatctaaaatacaaaaaataattttacagaatagcatgaaaagtatgaaacgaactatttaggtttttcacatacaaaaaaaaaaagaattttgctcgtgcgcgagcgccaatctcccatattgggcacacaggcaacaacagagtggctgcccacagaacaacccacaaaaaacgatgatctaacggaggacagcaagtccgcaacaaccttttaacagcaggctttgcggccaggagagaggaggagaggcaaagaaaaccaagcatcctcctcctcccatctataaattcctccccccttttcccctctctatataggaggcatccaagccaagaagagggagagcaccaaggacacgcgactagcagaagccgagcgaccgccttcttcgatccatatcttccggtcgagttcttggtcgatctcttccctcctccacctcctcctcacagggtatgtgcccttcggttgttcttggatttattgttctaggttgtgtagtacgggcgttgatgttaggaaaggggatctgtatctgtgatgattcctgttcttggatttgggatagaggggttcttgatgttgcatgttatcggttcggtttgattagtagtatggttttcaatcgtctggagagctctatggaaatgaaatggtttagggtacggaatcttgcgattttgtgagtaccttttgtttgaggtaaaatcagagcaccggtgattttgcttggtgtaataaaagtacggttgtttggtcctcgattctggtagtgatgcttctcgatttgacgaagctatcctttgtttattccctattgaacaaaaataatccaactttgaagacggtcccgttgatgagattgaatgattgattcttaagcctgtccaaaatttcgcagctggcttgtttagatacagtagtccccatcacgaaattcatggaaacagttataatcctcaggaacaggggattccctgttcttccgatttgctttagtcccagaattttttttcccaaatatcttaaaaagtcactttctggttcagttcaatgaattgattgctacaaataatgcttttatagcgttatcctagctgtagttcagttaataggtaatacccctatagtttagtcaggagaagaacttatccgatttctgatctccatttttaattatatgaaatgaactgtagcataagcagtattcatttggattattttttttattagctctcaccccttcattattctgagctgaaagtctggcatgaactgtcctcaattttgttttcaaattcacatcgattatctatgcattatcctcttgtatctacctgtagaagtttctttttggttattccttgactgcttgattacagaaagaaatttatgaagctgtaatcgggatagttatactgcttgttcttatgattcatttcctttgtgcagttcttggtgtagcttgccactttcaccagcaaagttc

SEQ ID NO: 40 - DNA, 1179 bp, Oryza sativa
ttgcagttgtgaccaagtaagctgagcatgcccttaacttcacctagaaaaaagtatacttggcttaactgctagtaagacatttcagaactgagactggtgtacgcatttcatgcaagccattaccactttacctgacattttggacagagattagaaatagtttcgtactacctgcaagttgcaacttgaaaagtgaaatttgttccttgctaatatattggcgtgtaattcttttatgcgttagcgtaaaaagttgaaatttgggtcaagttactggtcagattaaccagtaactggttaaagttgaaagatggtcttttagtaatggagggagtactacactatcctcagctgatttaaatcttattccgtcggtggtgatttcgtcaatctcccaacttagtttttcaatatattcataggatagagtgtgcatatgtgtgtttatagggatgagtctacgcgccttatgaacacctacttttgtactgtatttgtcaatgaaaagaaaatcttaccaatgctgcgatgctgacaccaagaagaggcgatgaaaagtgcaacggatatcgtgccacgtcggttgccaagtcagcacagacccaatgggcctttcctacgtgtctcggccacagccagtcgtttaccgcacgttcacatgggcacgaactcgcgtcatcttcccacgcaaaacgacagatctgccctatctggtcccacccatcagtggcccacacctcccatgctgcattatttgcgactcccatcccgtcctccacgcccaaacaccgcacacgggtcgcgatagccacgacccaatcacacaacgccacgtcaccatatgttacgggcagccatgcgcagaagatcccgcgacgtcgctgtcccccgtgtcggttacgaaaaaatatcccaccacgtgtcgctttcacaggacaatatctcgaaggaaaaaaatcgtagcggaaaatccgaggcacgagctgcgattggctgggaggcgtccagcgtggtggggggcccacccccttatccttagcccgtggcgctcctcgctcctcgggtccgtgtataaataccctccggaactcactcttgctggtcaccaacacgaagcaaaaggacaccagaaacatagtacacttgagctcactccaaactcaaacactcacacca

SEQ ID NO: 41 - protein, 11 aa, Artificial sequence
  Motif I
  VARIANT (1)..(1): /replace = "Pro"  /replace = "Arg" /replace = "Gly"
  VARIANT (2)..(2): /replace = "Ser" /replace = "Met"
  VARIANT (3)..(3): /replace = "Ala"
  VARIANT (4)..(4): /replace = "Ile" /replace = "Val"
  VARIANT (6)..(6): /replace = "Val" /replace = "Phe"
  VARIANT (8)..(8): /replace = "Val" /replace = "Arg" /replace = "Lys"
  VARIANT (9)..(9): /replace = "Asp"
  VARIANT (10)..(10): /replace = "Ile" /replace = "Val"
KIDLDIIQELD

SEQ ID NO: 42 - protein, 14 aa, Artificial sequence
  Motif II
  VARIANT (2)..(2): /replace = "Arg"
  VARIANT (3)..(3): /replace = "Leu" /replace = "Ile"
  UNSURE (5)..(7): Xaa can be any naturally occurring amino acid or a gap
  VARIANT (8)..(8): /replace = "Tyr" /replace = "Asn"
  VARIANT (9)..(9): /replace = "Glu"
  VARIANT (11)..(11): /replace = "Arg"
  VARIANT (12)..(12): /replace = "Asn" /replace = "Ser"
CKYGXXXGDEGTEW

SEQ ID NO: 43 - protein, 11 aa, Artificial sequence
  Motif III
  VARIANT (7)..(7): /replace = "Val"
  UNSURE (9)..(9): Xaa can be any naturally occurring amino acid, preferably Gln, Arg or Lys
  UNSURE (11)..(11): Xaa can be any naturally occurring amino acid, preferably Pro, Arg or Lys
GWVVCRAFXKX

SEQ ID NO: 44 - DNA, 30 bp, Artificial sequence
  primer: adapter primer
aagcagtggtatcaacgcagagtacgcggg

SEQ ID NO: 45 - DNA, 26 bp, Artificial sequence
  primer: OsNAM2-2
ctctccagaggcggcatcatgtcgga

SEQ ID NO: 46 - DNA, 18 bp, Artificial sequence
  primer: OsNAM2-1
tgatcgggatgaggaaga

SEQ ID NO: 47 - DNA, 21 bp, Artificial sequence
  primer: OsNAM2-3
gatcagtctcggtcatcgatg

SEQ ID NO: 48 - DNA, 53 bp, Artificial sequence
  primer: prm08733
ggggacaagtttgtacaaaaaagcaggcttaaacaatggatcggcatgaggag

SEQ ID NO: 49 - DNA, 48 bp, Artificial sequence
  primer: prm08734
ggggaccactttgtacaagaaagctgggttcgatcgatcagtctcggt

SEQ ID NO: 50 - DNA, 1016 bp, Oryza sativa
tcacaacccacaacattttcaaacaacgcaaagcagtagcagcagcgagaagcaagcaagaagcgatggggatggggatgaggagggagagggacgcggaggcggagctgaacctgccgccggggttcaggttccaccccacggacgacgagctggtggagcactacctgtgcaggaaggcggcggggcagcgcctgccggtgccgatcatcgccgaggtggatctctacaagttcgacccgtgggatctgcccgagcgcgcgctgttcggcgccagggagtggtacttcttcaccccgcgggatcgcaagtatcctaatgggtcacgccccaaccgcgccgccggcaacgggtactggaaggccaccggcgccgacaagcccgtcgcgccgcgggggcgcacgcttgggatcaagaaggcgctcgtgttctacgccggcaaggcgccgcgaggggtcaagactgattggatcatgcatgagtaccggctcgccgatgctggccgcgccgccgcgggcgccaagaagggatctctcaggttggatgattgggtgctgtgtcggctgtacaacaagaagaacgagtgggagaagatgcagcaggggaaggaggtgaaggaggaggcgtccgacatggttacgtcgcagtcgcactcgcacacccactcgtggggcgagacgcgcacgccggagtcggagatcgtggacaacgaccccttcccggagctggactcgttcccggcgttccagcctgcgccgccgccggcgacggcgatgatggtgcccaagaaagaatcgatggacgacgccaccgcggccgccgccgccgccgccaccatccccaggaacaacagcagcctgttcgtggacctgagctacgacgatatccagggcatgtacagcggcctcgacatgctgccgccgggcgacgacttctactcgtcgctcttcgcgtcgccgcgggtgaaggggacgacgccacgcgccggcgccggcatgggcatggtcccgttctga

SEQ ID NO: 51 - protein, 316 aa, Oryza sativa
MGMGMRRERDAEAELNLPPGFRFHPTDDELVEHYLCRKAAGQRLPVPIIAEVDLYKFDPWDLPERALFGAREWYFFTPRDRKYPNGSRPNRAAGNGYWKATGADKPVAPRGRTLGIKKALVFYAGKAPRGVKTDWIMHEYRLADAGRAAAGAKKGSLRLDDWVLCRLYNKKNEWEKMQQGKEVKEEASDMVTSQSHSHTHSWGETRTPESEIVDNDPFPELDSFPAFQPAPPPATAMMVPKKESMDDATAAAAAAATIPRNNSSLFVDLSYDDIQGMYSGLDMLPPGDDFYSSLFASPRVKGTTPRAGAGMGMVPF

SEQ ID NO: 52 - DNA, 1423 bp, Oryza sativa
tcgacccacgcgtccgctcttcccaacactagtaggataaagccacagagagagcagtagtagtagcgagctcgccggagaacggacgatcaccggagaagggggagagagatgagcggcggtcaggacctgcagctgccgccggggttccggttccacccgacggacgaggagctggtgatgcactacctctgccgccgctgcgccggcctccccatcgccgtccccatcatcgccgagatcgacctctacaagttcgatccatggcagcttccccggatggcgctgtacggagagaaggagtggtacttcttctccccgcgagaccgcaagtacccgaacgggtcgcggccgaaccgcgccgccgggtcggggtactggaaggcgaccggcgccgacaagccggtgggctcgccgaagccggtggcgatcaagaaggccctcgtcttctacgccggcaaggcgcccaagggcgagaagaccaactggatcatgcacgagtaccgcctcgccgacgtcgaccgctccgcccgcaagaagaacagcctcaggttggatgattgggtgctgtgccggatttacaacaagaagggcgggctggagaagccgccggccgcggcggtggcggcggcggggatggtgagcagcggcggcggcgtccagaggaagccgatggtgggggtgaacgcggcggtgagctccccgccggagcagaagccggtggtggcggggccggcgttcccggacctggcggcgtactacgaccggccgtcggactcgatgccgcggctgcacgccgactcgagctgctcggagcaggtgctgtcgccggagttcgcgtgcgaggtgcagagccagcccaagatcagcgagtgggagcgcaccttcgccaccgtcgggcccatcaaccccgccgcctccatcctcgaccccgccggctccggcggcctcggcggcctcggcggcggcggcagcgaccccctcctccaggacatcctcatgtactggggcaagccattctagacgaccaaaaaaaaaaaaaaacaaccgcattggcagcaatggtgtcactgaacaccgtgcaggctagctagcttcatggccggtgaactttgactcaggcgagccgccggagttgactcaaagataattaaaagaagtgttttaagtggattggattggattagacagaggagatgaggactcgagaaaggcggcgatgagaccgtggttggggggaccctggcctggactgaacgacgacgaggcagcagcagaaagatggtgcaattgcatcgggtggcatgtcagtgtgtgtgtatagtggcatgtacatagtacatggtgattgattcggtatacagggggctagctttcctgtttctgtttaaaaaaaaaaaaaaaaaaaaaaaaaaaaaaaaaa

SEQ ID NO: 53 - protein, 303 aa, Oryza sativa
MSGGQDLQLPPGFRFHPTDEELVMHYLCRRCAGLPIAVPIIAEIDLYKFDPWQLPRMALYGEKEWYFFSPRDRKYPNGSRPNRAAGSGYWKATGADKPVGSPKPVAIKKALVFYAGKAPKGEKTNWIMHEYRLADVDRSARKKNSLRLDDWVLCRIYNKKGGLEKPPAAAVAAAGMVSSGGGVQRKPMVGVNAAVSSPPEQKPVVAGPAFPDLAAYYDRPSDSMPRLHADSSCSEQVLSPEFACEVQSQPKISEWERTFATVGPINPAASILDPAGSGGLGGLGGGGSDPLLQDILMYWGKPF

SEQ ID NO: 54 - DNA, 1751 bp, Oryza sativa
cccctcgaggtcgacccacgcgtccgcttccattagcgactaatccagccttcgttaagggtgattagaatttgattaatttcaaggcctcagatcggagattgaatggagtgcggtggtgcgctgcagctgccgccggggttcaggttccacccgacggacgacgagctggtgatgtactacctgtgccgcaagtgcggcggcctccccctcgccgccccggtgatcgccgaggtggacctctacaagttcaacccatgggatctccccgagagggcgatgggaggggagaaggagtggtacttcttctcgccgcgggaccggaagtacccgaacgggcagcggccgaacagggcggcggggacggggtactggaaggcgacgggggcggacaagccggtggggtcgccgcgggcggtggcgatcaagaaggcgctcgtcttctacgccgggaagccgcccaagggcgtcaagaccaactggatcatgcacgagtaccgcctcgccgacgtcgaccgctccgccgccgcccgcaagctctccaagtcctcccacaacgccctcaggttggatgattgggtgttgtgccgaatctacaacaagaagggagtgatcgagaggtacgacacggtggacgccggcgaggacgtgaagccggcggcggcggcggcggcggcgaagggtggtcgcatcggcggcggcggcggcgcggcggcgatgaaggtggagctctccgactatgggttctacgaccaggagccggagtcggagatgctgtgcttcgaccggtcggggtcggcggaccgcgactcgatgccgcggctgcacaccgactccagcgggtcggagcacgtgctgtcgccgtcgccgtcgccggacgacttccccggcggcggcgaccacgactacgccgagagccagcccagcggcggatgcggcgggtggcccggcgtcgactgggccgccgtcggcgacgatggcttcgtcatcgacagctccctcttcgagctgccctcgccggcggcgttctcccgcgccgccggcgacggcgccgccttcggcgacatgttcacgtacctgcagaagccgttctaattaacggaacgtgacgcctctgcaaacgctaattagctcactaaccactgtcaggtcgatcgtgtaattcttttaccagtctagggtacagccaaaaaaccaaaaattaaccgtgctcgatcgatcgatcgatccatggatcgatgatcgcctccaccggcagatcaaaatcgaagcaaaaaatcagggagaattcttggtacttccagtacctctcgtcgacaccacgtgtcgggttttctgcaccgcggatcctcgctggccgcatcgtaacggcgagcgaggttaaaaatagtggagaattcaagaacacatccctgatttttgtttctgccggatggggagtaccgtgagcatggtagaaatgactggtaaaattttcgttgatgataggtagccagagtcgatgtaaccagtcgattttttttttttttggttttagttgacatgccttcctgatagattcagaacaaacaatagagaagagaggagaaaaaaacacagaggagaaattcagagaccaaagttcaaagttttggaattttcaggggcgccagcagctgatggtattgtcagtcgtgtctaggttcgtagaggaaattaaaatgtagaagaacgggtacttcagttcacttcaaaaaaaaaaaaaaaaaaaa

SEQ ID NO: 55 - protein, 329 aa, Oryza sativa
MECGGALQLPPGFRFHPTDDELVMYYLCRKCGGLPLAAPVIAEVDLYKFNPWDLPERAMGGEKEWYFFSPRDRKYPNGQRPNRAAGTGYWKATGADKPVGSPRAVAIKKALVFYAGKPPKGVKTNWIMHEYRLADVDRSAAARKLSKSSHNALRLDDWVLCRIYNKKGVIERYDTVDAGEDVKPAAAAAAAKGGRIGGGGGAAAMKVELSDYGFYDQEPESEMLCFDRSGSADRDSMPRLHTDSSGSEHVLSPSPSPDDFPGGGDHDYAESQPSGGCGGWPGVDWAAVGDDGFVIDSSLFELPSPAAFSRAAGDGAAFGDMFTYLQKPF

SEQ ID NO: 56 - DNA, 1336 bp, Oryza sativa
atcctccacaagagaaactaggatcttcaagtatagctagcattgcgccctcatttcatccatggcaatgcagctgtccttgcctgtcttgccaacgggttttcgtttccatccaaccgatgaggaactagtcatcaactacctccagaggcgtgctaccgggctatcgtgccccatccccataatcgcggatgtcgaaatatacaacttcaacccgtgggagcttccatccatggctctatttggggaacatgagtggtacttttttacactacgcgaccacaggtaccccaatagtgtgcgccctagtcgctcagcggcgtcaggcttttggaaggccaccggcactgacaagcccgtccaagttgctaacatgcaaagcactcctgtagctatgaagaaggcacttgtattctatgttggccgcccgcccatggaaaccaagactacatggatcatgcatgagtaccgtctcacaaacacgggagggtccactgcctcccacccatccttgtcttcatccaccgcacacccttctgtgaagctagacgagtgggtgctatgcaagatcttcaacaagtccccagagccggacaacaccgcaccaccatcaaacgtcgtctcacggttacagtgctcgccgccgctgccgccgccggcggcaccgcccggcaactacccgccgctgccggtgggtgcgacgaacgacggcggcgtgttcgcctgcgccggcgacatgctcttcaccatccaagagcaccaggagggaacaccatcgatgctgccgccgatccctaaccttgagccaccggcggcaacaattgggaattcctctctcaatggcactgctgctgctgctgctgctgctgatggccatggccgccttgaggaagaggacaccagcgcctacaccttcaccgaccaggaaatggagcagatgctcatggacctgatggaccaggatttctttggcaatgatcaaccccaggagtgaactgtgtggtggagtgattttcatatcattccatagctctgatctgtgctggagagtgaatttagtatctattgtaccagatagaataaaaccagaaaagaaataaaagaaggccaaagaaaaaagcaaaaagaaaattgtataattactaggtttggatgccgtctgtagaaccttgtgtgctatgtaacttttttctttgtattttggcattttcatcatattgtgtcataaataaagcagggctttcttttgtagtttgccatctcaatcttgcaccgtgatgttataaaaaaacaaaattaattattgtgctacactgtacttttggctgtgttcggc

SEQ ID NO: 57 - protein, 310 aa, Oryza sativa
MAMQLSLPVLPTGFRFHPTDEELVINYLQRRATGLSCPIPIIADVEIYNFNPWELPSMALFGEHEWYFFTLRDHRYPNSVRPSRSAASGFWKATGTDKPVQVANMQSTPVAMKKALVFYVGRPPMETKTTWIMHEYRLTNTGGSTASHPSLSSSTAHPSVKLDEWVLCKIFNKSPEPDNTAPPSNVVSRLQCSPPLPPPAAPPGNYPPLPVGATNDGGVFACAGDMLFTIQEHQEGTPSMLPPIPNLEPPAATIGNSSLNGTAAAAAAADGHGRLEEEDTSAYTFTDQEMEQMLMDLMDQDFFGNDQPQE

SEQ ID NO: 58 - DNA, 1176 bp, Oryza sativa
atgccgagcagcggcggcgccatgcctgcccttccaccaggcttccgcttccaccccaccgacgaggagctcatcgttcactacctcatgaaccaggccgcctccgtcaagtgccccgtgccaatcatcgccgaggtcaacatctacaagtgcaacccatgggaccttcctggtaaggctttgttcggcgagaacgaatggtacttcttcagcccgagggaccgcaagtaccccaacggcgctcgccccaaccgcgccgccggctcggggtactggaaggccaccggcaccgacaagtccatcctctccactccgaccagcgacaacatcggcgtcaagaaggccctcgtcttctacaagggcaagcctcccaagggcgtcaagaccgactggatcatgcacgagtaccgtctcaccggcacatcagctaacagcaccaccaccacaaagcagcgtagagcgtcatccatgaccatgaggctggacgactgggtgctgtgcagaatccacaagaagagcaacgacttcaattcctctgaccaacacgaccaagaacccgaggaatcaaccgtcgaacagcttgaagacatccatgacaacaactcctctgaacaacctccagctccagctgacatgaacaaccaacagtcagatttccagcccatgacggcgatgagcatgagcaagtcatgctccctcaccgatctcctcaacaccatcgactgcgccgcgctctcgcagtttctcctcgacggctcatccgacgccatcgctgagcctcctgctcctcccagccccctaatatacacaacacctcatccaaattaccaaacactaaactataacattaacagcaacagcagcatgccacacgccttcgagtcacgcctagatcatcacgatggttacgttaacaattataatgttaatggcctgaggaggaagagaatgatggcgtgtagtgcaacttcctttgatgatggcagcagcagcaatgactttgtgcatgccgttgtcaagaaaccgcagctgctgccaagtgattcgaggggtagtggttttggaggaggttactgcaaccagcagctttcagagactgcgactggctttcagtttcagaacggcaatctgctgagccatccatttcctctgaacaatcatctgcagatgcagtag

SEQ ID NO: 59 - protein, 391 aa, Oryza sativa
MPSSGGAMPALPPGFRFHPTDEELIVHYLMNQAASVKCPVPIIAEVNIYKCNPWDLPGKALFGENEWYFFSPRDRKYPNGARPNRAAGSGYWKATGTDKSILSTPTSDNIGVKKALVFYKGKPPKGVKTDWIMHEYRLTGTSANSTTTTKQRRASSMTMRLDDWVLCRIHKKSNDFNSSDQHDQEPEESTVEQLEDIHDNNSSEQPPAPADMNNQQSDFQPMTAMSMSKSCSLTDLLNTIDCAALSQFLLDGSSDAIAEPPAPPSPLIYTTPHPNYQTLNYNINSNSSMPHAFESRLDHHDGYVNNYNVNGLRRKRMMACSATSFDDGSSSNDFVHAVVKKPQLLPSDSRGSGFGGGYCNQQLSETATGFQFQNGNLLSHPFPLNNHLQMQ

SEQ ID NO: 60 - DNA, 1450 bp, Triticum aestivum
acgaggcactcgccccaatctcgaacaacggccgtcggatccatcatcatcggcagcggagcgattccatcgaccagctttctacagacggacatggggatgccggccgtgaggaggagggagagggacgcggaggcggagctcaacctgccccccggcttccgcttccaccccaccgacgacgagctcgtcgagcactacctctgccgcaaggcggcggggcagcgcctcccggtccccatcatcgccgaggtcgacctctaccgcttcgacccctgggcgctccctgaccgcgccctcttcggcacccgcgagtggtacttcttcaccccccgcgaccgcaagtaccccaacggctcccgacccaaccgcgccgccggcaacggctactggaaggccaccggcgccgacaagcccgtcgcgccccgcggcgggcggaccatggggatcaagaaggccctcgtgttttacgcgggcaaggcgcctaagggggtcaagaccgactggatcatgcatgagtatcgcctcgccgacgccggccgcgccgccgccagcaagaagggctcgctcaggctggacgactgggtgctctgccggctctacaacaagaagaacgagtgggagaagatgcagctgcagcagcaaggggaagaggagacgatgatggagcccaaggcggagaacacggcctccgacatggtggtcacctcgcactcccactcgcagtcccagtcgcactcgcactcgtggggcgaggcgcgcacgccggagtcggagatcgtcgacaacgacccgtcgctgttccagcaggcgacggcggcggcgttccaggcccagagccccgcggccgccgcggcgcaccaggagatgatggccacgctgatggtgcccaagaaggaggcggcggacgaggccggcaggaacgacctcttcgtcgacctcagctacgacgacatccagagcatgtacaacggcctcgacatgatgccgcccggggacgacctgctctactcctccctcttcgcctccccccgtgtccgcgggagccagcccggcgccggcggcatgccggccccgttctaagcagagcaaagacagagaccgtcagagaccccgagatcgacagaagtggaatggacgacttcttggccgcgagcgagcgagaccgcggtgcagtgtaaatacagcataggaaacgggagggagggaggtggcgtcgtgtcgagagaagccggcgtcgtgccggggcgtgccgttgtacatggagagcccggcgccggggcctggccggctgggttgattcttttgttcttactaccttgtactctcaatgcggatgtagctctttcttctcactcctcactagtagaatcgaccgaccgaatacatatgtagctctgttctttccttctcttcagtagaaatcaaccaaattttgctgttatgctgc

SEQ ID NO: 61 - protein, 329 aa, Triticum aestivum
MGMPAVRRRERDAEAELNLPPGFRFHPTDDELVEHYLCRKAAGQRLPVPIIAEVDLYRFDPWALPDRALFGTREWYFFTPRDRKYPNGSRPNRAAGNGYWKATGADKPVAPRGGRTMGIKKALVFYAGKAPKGVKTDWIMHEYRLADAGRAAASKKGSLRLDDWVLCRLYNKKNEWEKMQLQQQGEEETMMEPKAENTASDMVVTSHSHSQSQSHSHSWGEARTPESEIVDNDPSLFQQATAAAFQAQSPAAAAAHQEMMATLMVPKKEAADEAGRNDLFVDLSYDDIQSMYNGLDMMPPGDDLLYSSLFASPRVRGSQPGAGGMPAPF

SEQ ID NO: 62 - DNA, 1141 bp, Zea mays
  variation (1084)..(1084): /replace="t" /replace="c" /replace="g"
gcacgaggaacccgcccacaggacaggacacacagagccgagccaccccacccaccatcggcgaccagcagccagccgcgggagcgagctgtttaaagacaccgagtcggagtcggacggaggactggcaggcacaaccgaagccaccgcttctagttctcgggttcatcgccagcaatccagaccacataatgggacagccggtgacgaggaggagggagagggacgcggaggcggagctggacctgccgccggggttccggttccaccccacagacgacgagctggtggagcactacctgtgccgcaaggcggcggggcagcgcctccccgtgcccatcatcgccgaggtggacctgtacaggttcgacccgtgggacctgccggagcgcgcgctcttcggggcccgggagtggtacttcttcacgcccagggaccgcaagtaccccaacggctcccgccccaaccgcgccgccggcgacgggtactggaaggccaccggcgccgacaagcccgtcgcgccgcgcgccgccgccgccgacgcccgcacgctcgggatcaagaaggcgctcgtcttctacgccggcaaggcgccgcgcggggtcaagacagactggatcatgcacgagtacaggctcgctgacgccggcggacgcgccaagaaggggtcgctcaggttggatgactgggtgctgtgccggctgtacaacaagaagaacgagtgggagaagatgcggctggggaagggggcagccgccggcgcagtcaaagaggaggaggccatggacatgagcacctcccactcgcagatcacccactcgtggggcgagacgcgcacgccggagtcggagatcgtggacaacgacctgccgttcccggatccggcgatgatggtgcccaagaaggagcgggtggacgacggcggcagcgccaggaccagcgacctgttcgtggatctcagctacgacgacatccaaggcatgtacagcggcctcgacatgctgccgccggccggcgaggacttgtactcctcgctcttcgcgtcgcccagggtcagggggaaccagcccaccggacccgcggagttgggccccttctgagtgagctcaggcgaagatggaggcatggagatcaggagaga

SEQ ID NO: 63 - protein, 302 aa, Zea mays
  Misc_Feature (298)..(298): Xaa at position 298 can be any amino acid
MGQPVTRRRERDAEAELDLPPGFRFHPTDDELVEHYLCRKAAGQRLPVPIIAEVDLYRFDPWDLPERALFGAREWYFFTPRDRKYPNGSRPNRAAGDGYWKATGADKPVAPRAAAADARTLGIKKALVFYAGKAPRGVKTDWIMHEYRLADAGGRAKKGSLRLDDWVLCRLYNKKNEWEKMRLGKGAAAGAVKEEEAMDMSTSHSQITHSWGETRTPESEIVDNDLPFPDPAMMVPKKERVDDGGSARTSDLFVDLSYDDIQGMYSGLDMLPPAGEDLYSSLFASPRVRGNQPTGPAXLGPF

SEQ ID NO: 64 - DNA, 1090 bp, Triticum aestivum
aattcggcacgagacagtccaccacgcacgtgcagcagcaccagcgcccgagaatcccattcccatcgacggagaagaagaagtgaagaaacaatggtgatggcagcggcggagcggcgggacgcggaggcggagctgaacctgccgccggggttccggttccacccgacggacgaggagctggtggcggactacctctgcgcgcgcgcggccggccgcgcgccgccggtgcccatcatcgccgagctcgacctctaccggttcgacccgtgggagctcccggagcgggcgctcttcggggcgcgggagtggtacttcttcacgccgcgggaccgcaagtaccccaacggctcccgccccaaccgggccgccgggggcggctactggaaggccaccggcgccgacaggcccgtggcgcgcgcgggcaggaccgtcgggatcaagaaggcgctcgtcttctaccacggcaggccgtcggcgggggtcaagacggactggatcatgcacgagtaccgcctcgccggcgccgacggacgcgccgccaagaacggcggcacgctcaggcttgacgaatgggtgctctgccgcctatacaacaagaagaaccagtgggagaagatgcagcggcagcggcaggaggaggaggcggcggccaaggctgcggcgtcacagtcggtctcctggggtgagacgcggacgccggagtccgacgtcgacaacgatccgttcccggagctggactcgctgccggagttccagacggcaaacgcgtcaatactgcccaaggaggaggtgcaggagctgggcaacgacgactggctcatggggatcagcctcgacgacctgcagggccccggctccctgatgctgccctgggacgactcctacgccgcctcgttcctgtcgccggtggccacgatgaagatggagcaggacgtcagcccattcttcttctgagctctcaatactctcacggtcgcactgttgtgtgcggcgtaactgtagatagttcacatttgttcaggatttatttgtaacgttgcttcttttatacgatactctcttcctttctaaaaaaaaaaaaaaaaaa

SEQ ID NO: 65 - protein, 287 aa, Triticum aestivum
MVMAAAERRDAEAELNLPPGFRFHPTDEELVADYLCARAAGRAPPVPIIAELDLYRFDPWELPERALFGAREWYFFTPRDRKYPNGSRPNRAAGGGYWKATGADRPVARAGRTVGIKKALVFYHGRPSAGVKTDWIMHEYRLAGADGRAAKNGGTLRLDEWVLCRLYNKKNQWEKMQRQRQEEEAAAKAAASQSVSWGETRTPESDVDNDPFPELDSLPEFQTANASILPKEEVQELGNDDWLMGISLDDLQGPGSLMLPWDDSYAASFLSPVATMKMEQDVSPFFF

SEQ ID NO: 66 - DNA, 1255 bp, Oryza sativa
catccaacaacccaccaccctcattccctcaagtcccaagatcgaacacctcgtgtccatggcggcggcgaagcggcgagtgcgcgacgcggaggcggacctgaacctcccgccgggcttccgcttccaccccaccgacgaggagctggtggcgcactacctctgcccgcgcgccgcgggccgcgccgccccggtccccatcatcgccgagctcgacctctaccgccacgacccatgggacctcccccaccgcgccctcttcggccgccgcgagtggtacttcttcaccccgcgcgaccgcaagtaccccaacggctcccgccccaaccgcgccgccgcctcgggctactggaaggccaccggcgccgacaagcccgtgctgcacaacggcaggacggccgggatcaagaaggcgctcgtgttctaccacggcaagcccccccgcggcgtcaagacggagtggatcatgcacgagtaccgcctcgccaagaagggcggcgccgccgccgccgcgggcgcgggcgcgctcaggctggatgactgggtgctgtgccggctgtacaacaagaagaacgagtgggagaagatgcagagcaggaaggaggaggaggaggccatggcggcggcgcagtcgtggggggagacgcggacgccggagtcggaggtcgtcgacagcgacgcgttcccggagatggactactcgctgccggcggcgtcgttcgacgacgccctgctgcccaaggaggaggcgcgcgacgacgactggctcatggggatgagcctcgacgacctccagggcctcggctcgctgctgcaggccgacgacctctccatgctcgcgccgccgccggcggcgaagacggagccgctcggcgcgccattcttctgagctctctctctctctctctctctctctctctctgtgactgcaccactgtatataaattcagagttttcagacatgttcagtattcagagttctcaggcaagttcagaattcagagatggttaaggattagtggcttatgagcagtatgatatgcaggttagtttctagtttagcagtgttactccagattggagatttgattaatgatttgattctaattaatgtagtatactgagtgttactcatcatcacagattcatcagagctgtgtcaagtgacaattctttttttttttatttcctggatcaagttcaccatgttgtgctcaagatttgtggataaatgcacatccatccttgaattggc

SEQ ID NO: 67 - protein, 276 aa, Oryza sativa
MAAAKRRVRDAEADLNLPPGFRFHPTDEELVAHYLCPRAAGRAAPVPIIAELDLYRHDPWDLPHRALFGRREWYFFTPRDRKYPNGSRPNRAAASGYWKATGADKPVLHNGRTAGIKKALVFYHGKPPRGVKTEWIMHEYRLAKKGGAAAAAGAGALRLDDWVLCRLYNKKNEWEKMQSRKEEEEAMAAAQSWGETRTPESEVVDSDAFPEMDYSLPAASFDDALLPKEEARDDDWLMGMSLDDLQGLGSLLQADDLSMLAPPPAAKTEPLGAPFF

SEQ ID NO: 68 - DNA, 1683 bp, Elaeis guineensis
aggcagaaatctcaccgccgcctcagccatttctaaagcttggtacaaggaacggtaatcctccaggcaatcgagttgcgaggacgctgacaatggggagcaggagaagagatgctgaggcggagctcaacctgccgccgggattccggttccacccgaccgacgaggagctcgtcgttcattacctctgcaagaaggtggcctgccagcgcctgcccgtgcccatcatcgccgaggtcgatctctacaaatatgacccatgggatctgccagagaaggcgttgttcgggctaaaagagtggtatttcttcacccctcgtgatcgaaagtacccgaatggctcgaggcctaacagggccgccgggagggggtactggaaggcgaccggtgctgataaacccgtgaccccgaaggggagcagtaggcctctcgggatcaagaaagccttggtgttttactctgggaaggcaccaagaggagtgaagactgattggatcatgcatgagtacaggcttgccgacacgaaccgagcagccaacaagaagggaagcctaaggcttgatgactgggttctttgccggttgtacaacaagaagaacacctgggagaagatgcagcaacaaaaggaggcagcatcgtttggagagacgatggattctgtggatgacacaggatcggacagcttcagaacacccgaatcggacatagataacgatgtcatgttcccggactttgacgatatggctcaggttggagctcacccacctcaagctttcaatggaatgcaaggagtacgagtcaacaatataactgggtatcagccagcaatagagcagcgtccaaaagaggagaatgactggttcacggacctgaatctggatgacttccacagtacatgcatggcttttggatcaacacctgctctcgatatgtcggaccatgattactactactcaaaccttccacaactgagatcaaaccagagtgacctgctacccttctaaagctacgaatcccagctgtatataagtgaaaataggcaggaggtgacaatctagtggtagaactctgtaggattcttttgtttccaccaattttatataggtaaatccattcataagcaagggacagtcgctgatgtacatatgataatattattttgtggtagaccttctgtttgaattagttttacaaattttgagcattgtctagtggtagaatatcttcgtttcgattacagaaacttgcctcagcaacaggaaacatattccacacacacacacacacaaaaaaagaaaagcagcagcaggaatcagaataagttatagatggtgggataatcttaagtgacagtatataacactgcgcacaaaaaggtggacagtgagaactcaaaggagaatcagccgtggcatgcggtcatagttattcgttcagagagacagtttatagcatctgcttgggatctttgtttagtgcgacacaaccaacagtaggaacaaagaatatctgtggacatccacaagtccagggtagtatcgaggaaacaagcaacgttgtgtcgatttgacaagagtgaccctccaaatgttaagttttctggaagaggggaaagaagtggaagcataagcgcatgcataagcaagcacatcaccagcgaaagcaaaaaaaaaaaaaaaaaaa

SEQ ID NO: 69 - protein, 303 aa, Elaeis guineensis
MGSRRRDAEAELNLPPGFRFHPTDEELVVHYLCKKVACQRLPVPIIAEVDLYKYDPWDLPEKALFGLKEWYFFTPRDRKYPNGSRPNRAAGRGYWKATGADKPVTPKGSSRPLGIKKALVFYSGKAPRGVKTDWIMHEYRLADTNRAANKKGSLRLDDWVLCRLYNKKNTWEKMQQQKEAASFGETMDSVDDTGSDSFRTPESDIDNDVMFPDFDDMAQVGAHPPQAFNGMQGVRVNNITGYQPAIEQRPKEENDWFTDLNLDDFHSTCMAFGSTPALDMSDHDYYYSNLPQLRSNQSDLLPF

SEQ ID NO: 70 - DNA, 1264 bp, Oryza sativa
gcagcatcaacaaaggcagcagcagcagcagcagcagcagcagcgttggtggtggtggtgtgtcatcaccaacattttcacgagaggagaaggatggaaatggcggcggcggttgggggcagcgggaggagggacgcggaggcggagctgaacctgccgccgggcttccgtttccacccgaccgacgaggagctcgtggtgcactacctctgccgcaaggttgcccggcagccgctccccgtcccaatcatcgccgaggtcgacctctacaagctcgacccctgggatctccctgagaaggcgttgttcgggaggaaagagtggtacttcttcacgccgagggaccggaagtacccgaacgggtcgaggccgaaccgcgcagcggggagagggtactggaaggcgacgggagccgacaagccggtggcgcccaaggggagcgcgaggacggtggggatcaagaaggcgctcgtgttctactccgggaaggcgccgaggggggtcaagacggactggatcatgcacgagtaccgcctcgccgacgccgaccgcgccccgggcggcaagaagggctcacagaagctggacgagtgggtgctgtgccggctgtacaacaagaagaacaactgggagaaggtgaagctggagcagcaggacgtggcctccgtggcggcggcggcgccgcgcaaccaccaccatcagaacggcgaggtcatggacgcggcggcggctgacaccatgtccgacagcttccagacgcacgactccgacatcgacaacgcctccgccggcctgcggcacggtggctgcggcggcggcggcttcggcgacgtggcgccgccgaggaatgggttcgtgacggtgaaggaggacaacgactggttcaccggcctcaacttcgacgagctgcagccgccgtacatgatgaacctgcagcacatgcagatgcagatggtgaatccggcggcgccagggcacgacggcggctacttgcagtccatcagctcgccgcagatgaagatgtggcagacaatcctgccaccattctgagatggatggagcaagaaaaaggttgctgtagataaagggcggaaataggagtgatggctagaaaattattagatttactagaacgaaaatgattagaaatctggcaagcatgattctgcaaatgtggtggtagatgcttgcagtatgtaattcatttgttcagtatatgcatttggtaatctgcaaaacaaaaaaaaaaaaaaaaaaaaaaaaa

SEQ ID NO: 71 - protein, 316 aa, Oryza sativa
MAAAVGGSGRRDAEAELNLPPGFRFHPTDEELVVHYLCRKVARQPLPVPIIAEVDLYKLDPWDLPEKALFGRKEWYFFTPRDRKYPNGSRPNRAAGRGYWKATGADKPVAPKGSARTVGIKKALVFYSGKAPRGVKTDWIMHEYRLADADRAPGGKKGSQKLDEWVLCRLYNKKNNWEKVKLEQQDVASVAAAAPRNHHHQNGEVMDAAAADTMSDSFQTHDSDIDNASAGLRHGGCGGGGFGDVAPPRNGFVTVKEDNDWFTGLNFDELQPPYMMNLQHMQMQMVNPAAPGHDGGYLQSISSPQMKMWQTILPPF

SEQ ID NO: 72 - DNA, 1129 bp, Glycine max
ttccagagttggtgttagtcttggtgtagtgtagctagggagggatatatatctgagtaagatggcatcagagcttgaattgcccccaggcttcagattccatccaacggacgaggagctggtgttgcactatctctgccgcaaatgcgcgtcgcagccaatcgccgttcccatcatcgccgaaatcgacctctacaaatacgacccctgggacttacccggattggctacttatggagagaaagagtggtacttcttttcaccacgggaccggaaatacccaaacggttcgaggccgaaccgggcggctggcaccggttactggaaggcaaccggggcggataagcccattggtcagcccaaaccggttgggattaaaaaagctttggtgttttacgcagggaaagctcctaaaggggacaaaagcaattggatcatgcacgagtatcgtctcgcagacgtagatcgctccgttcgcaaaaagaacaccctaaggttggatgattgggtgctttgccgtatttacaacaagaagggcacgatcgagaaactgcaaccaagcagcgatgttgctcatagccgaaatatcgaatcctcggagatcgaagacaggaagccggagattctgaaaagcggaggaggttgtcttccgccgcctgcgccggtgcctgcgccgccgcaagcgacggcgaagacggattacatgtacttcgacccgtcggattcaatcccgaagctgcacacggactcgagctgttcggagcaggtggtatcgccgggattcgcgagcgaggtgcaaagcgagcccaagtggaacgagtgggagaaaagcctcgaatttccatttaattacgtggatgccactctcaacaacagcttcatggcccaattccagggcaataatcagatgttgtcgccgctgcaggacatgttcatgtactggcccaacaagtccttttgagcacatcatgatggttttaaattacgatccacaattgctcttaagattttctgactcaccatgcgaccacaatcgtaatttaaaaccatgtcacataaaatccacgcgcgccgcccattcgcatttgcacggtagcacgagactcaaggtccatgagtgtgcctgtaa

SEQ ID NO: 73 - protein, 299 aa, Glycine max
MASELELPPGFRFHPTDEELVLHYLCRKCASQPIAVPIIAEIDLYKYDPWDLPGLATYGEKEWYFFSPRDRKYPNGSRPNRAAGTGYWKATGADKPIGQPKPVGIKKALVFYAGKAPKGDKSNWIMHEYRLADVDRSVRKKNTLRLDDWVLCRIYNKKGTIEKLQPSSDVAHSRNIESSEIEDRKPEILKSGGGCLPPPAPVPAPPQATAKTDYMYFDPSDSIPKLHTDSSCSEQVVSPGFASEVQSEPKWNEWEKSLEFPFNYVDATLNNSFMAQFQGNNQMLSPLQDMFMYWPNKSF

SEQ ID NO: 74 - DNA, 1304 bp, Lycopersicon esculentum
ggcacgagcaaagcaggagcaggagcagcaacaaacagagagaagaaaacagaggaagataagaggaaaatttatcgaattcgaatcgagagaaaaggggaagtgaagttgcgaagagtgagaatttcaaaggaaatgaacaaaggagcaaacggaaatcagcaattggagttaccggcgggattcagattccatccgacagacgacgaattggtgcagcactatctctgcaggaaatgcgccggacagtcgattgctgtatcaattatagctgaaattgatctttacaagtttgatccatggcagttgcctgagaaggctttgtacggtgaaaaagagtggtattttttctcaccaagggatagaaaatatccgaacggttcacggccgaaccgagcagcaggaaccggttattggaaggcaaccggagctgataaaccggtgggaaaacccaaaaccttagggataaagaaggcacttgtgttctatgccggaaaagcacccagaggtataaaaacaaattggattatgcacgagtaccgcctcgccaacgtggaccgctctgctggcaagaacaataacttgaggcttgatgattgggtattgtgtcgaatatacaacaagaaaggcacacttgagaagcattacaatgtggacaacaaggaaactacaagctttggagaatttgatgaagaaataaaaccaaaaatattgcccacacaattagcaccgatgccaccacggcctcgatcgacaccagcaaacgactacttttatttcgagtcatcagagtcgatgactagaatgcacacgacaaactcgagctctggctcagagcatgtcttgtcgccatgtgacaaggaggttcagagcgcgcccaaatgggacgaagaccacagaaacacccttgattttcagctaaactatttggatggtttactaaatgaaccatttgaaacccaaatgcagcagcaaatttgcaactttgaccagttcaacaatttccaagacatgttcctatacatgcaaaaaccttactaaaattgtataaattcattggatctaaattgagtgtgatccatgacattttctttgttctttggtggtgtaggtcaactttttattaagtagtttagagaagtacaaaatgctagtcaaatttggtgggctacagcacaaatgagccttgataagcatagccaaagagtcgtatagaagggcttattattattgtaaggtatgtaaaaacaaatgaaaatttgttaatatcaagttatcattcttcaaaaaaaaaaaaaaaaaaa

SEQ ID NO: 75 - protein, 301 aa, Lycopersicon esculentum
MNKGANGNQQLELPAGFRFHPTDDELVQHYLCRKCAGQSIAVSIIAEIDLYKFDPWQLPEKALYGEKEWYFFSPRDRKYPNGSRPNRAAGTGYWKATGADKPVGKPKTLGIKKALVFYAGKAPRGIKTNWIMHEYRLANVDRSAGKNNNLRLDDWVLCRIYNKKGTLEKHYNVDNKETTSFGEFDEEIKPKILPTQLAPMPPRPRSTPANDYFYFESSESMTRMHTTNSSSGSEHVLSPCDKEVQSAPKWDEDHRNTLDFQLNYLDGLLNEPFETQMQQQICNFDQFNNFQDMFLYMQKPY

SEQ ID NO: 76 - DNA, 1060 bp, Brassica napus
cgaagaaaagagaagacttttgaaaaaaaaaatgaaagcagggctaaacttaccagcaggattccgattccacccaacggacgaagagcttgtgcaattctacctttgccggaaatgcgcatcggaggagatctcagctccggtcatcgccgaaatcgatctctacaagttcaacccctgggagcttcctgagatgtctctgtacggagagaaagagtggtacttcttctcgccacgagaccggaaatacccaaacggttcgcgtcctaaccgggcggcgggaaccggttattggaaagccaccggagctgataaaccgatcggtaaaccgaagacgctgggtattaagaaagcgctcgtgttctacgcagggaaagctcccaaagggattaagacgaattggattatgcacgagtatcgcctcgctaatgtggacagatcagcttctgttaacaaaaagaacaaccttcgacttgatgattgggtgttatgtcgaatctacaacaagaaagggaccatggagaagtactaccctgctgatgagaaaccgatgaccgtgacggcggcttcatcgcctttcgatgcgtcggactcgacttacccgacgttgcaagaggatgactcgagcagctcggggggtcgcgtggtgtcgccggatgcgcgggaggtgcagagcgagcctaaatggggggagtttgagaatgcttttgatgcttccatgttcggtggtggctccatggacttgctgcagagtgaagattttgtgcctcagttcttgtaccagccttcttatgatttcaactcctggcaggaggatccgccggagcagaaaccgttcttgaattggagttttgctccacaggggtgaaaaaggaagagagtgaaaggttttttggtctgtgttgtgatatgtgttagagagaagttctcaatcatcttttgtttcttagtagtgagagaaagattgtagagtgttgatagtttcttagcatcttcaatgtttcattggcaggtgaattcttgttatttcatcagaaatttatatgaaaaattatacctt

SEQ ID NO: 77 - protein, 278 aa, Brassica napus
MKAGLNLPAGFRFHPTDEELVQFYLCRKCASEEISAPVIAEIDLYKFNPWELPEMSLYGEKEWYFFSPRDRKYPNGSRPNRAAGTGYWKATGADKPIGKPKTLGIKKALVFYAGKAPKGIKTNWIMHEYRLANVDRSASVNKKNNLRLDDWVLCRIYNKKGTMEKYYPADEKPMTVTAASSPFDASDSTYPTLQEDDSSSSGGRVVSPDAREVQSEPKWGEFENAFDASMFGGGSMDLLQSEDFVPQFLYQPSYDFNSWQEDPPEQKPFLNWSFAPQG

SEQ ID NO: 78 - DNA, 969 bp, Oryza sativa
atgagcggcggcggcgaaggggcggcggcggcggagaggcaggagctgcagctgccgccggggttcaggttccacccgacggacgaggagctggtgatgcactacctctgccggcggtgcgccggcctccccatcgccgtccccatcatcgccgaggtcgacctctacaagttcgatccatggcatctcccaagaatggcgctgtacggcgagaaggagtggtacttcttctcccctcgggaccgcaagtacccgaacgggtcgcggccgaaccgcgccgccgggtccgggtactggaaggccaccggcgccgacaagccggtgggcacgccgaggccggtggccatcaagaaggcgctcgtcttctacgccggcaaggcgcccaagggcgacaagaccaactggatcatgcacgagtaccgcctcgccgacgtcgaccgctccgcccgcaagaagaacaccctccggctagatgattgggtcctgtgccgaatctacaacaagaaaggcggcgtggagaagccgagcggcggcggcggcggcgaacgttcgaatatgatgagccacggggagaccgcgtcggcgggctcgccgccggagcagaagccggccgtgctgccgccgccgccaccgccgtacgcggcggcggcgccgttctcggagctggcggcgttctacgacgtgcggccgtcggactcggtgccgcgggcgcacggcgcggactcgagctgctcggagcacgtgctgacgacgtcggcgtcgtccggcggcgtcgtcgagcggccggaggtgcagagccagcccaagatcgccgagtgggagcgcacgttcgccggcgccgccgccccggctggcgccgtcagcacggccggaccgattctgggccagctcgaccccgccgccgccgtcgccggcggcggcgacccgctcctccaggacatcctcatgtactggggcaagccgttctga

SEQ ID NO: 79 - protein, 322 aa, Oryza sativa
MSGGGEGAAAAERQELQLPPGFRFHPTDEELVMHYLCRRCAGLPIAVPIIAEVDLYKFDPWHLPRMALYGEKEWYFFSPRDRKYPNGSRPNRAAGSGYWKATGADKPVGTPRPVAIKKALVFYAGKAPKGDKTNWIMHEYRLADVDRSARKKNTLRLDDWVLCRIYNKKGGVEKPSGGGGGERSNMMSHGETASAGSPPEQKPAVLPPPPPPYAAAAPFSELAAFYDVRPSDSVPRAHGADSSCSEHVLTTSASSGGVVERPEVQSQPKIAEWERTFAGAAAPAGAVSTAGPILGQLDPAAAVAGGGDPLLQDILMYWGKPF

SEQ ID NO: 80 - DNA, 1295 bp, Solanum tuberosum
ggtcaaacaactgaaactaacaaagcagcagcagcagcaacaaacagagaagacaacagaggaagataaacaaaggaaattaagagggagatttatcgaatcgaaagggaaagggaagttacgaagagtgagaatttgaaggaaatgaacaaaggagcaaccggaaatcagcaattggagttaccggcgggattcagattccatccgacagacgacgaattggtgcagcattatctctgcaggaaatgtgccggacagccaattgcagtatcaattataactgaaattgatctttacaagtttgatccatggcagttgcctgaaaaggctttgtacggtgaaaaggagtggtattttttctcaccaagggatagaaaatatcctaacggttcacggccgaaccgagcagcaggaaccggttattggaaggcaaccggagcagataaaccggtgggaaaacccaaaacattagggataaagaaggcacttgtgttttatgctggaaaagcacctagaggaataaaaaccaattggattatgcatgagtaccggctcgccaatgtggaccggtctgctggcaagaacaataacttgaggcttgatgattgggtattgtgtcgaatttacaacaagaaaggcacacttgagaagcattacaatgtggacaacaaggaaactgcaagctttggagaatttgatgaagaaataaaaccaaaaatattgcccacacaattagcacagatgccaccacggccccgatcgacaccgacaaacgactacttccatttcgaatcatcggagtcgatgactagaatgcacaccacaaactcgagctctggctcagagcatgtcttgtcgccatgtgacaaggaggttcagagcgcgcccaaatgggacgaagaccacagaaacacccttgattttcagctaaattatctggatggtttactaaatgaaccatttgaaacccaaatgcagcagcaaagttgcaactttgaccagttcaacaatttccaagacatgttcttttacatgcaaaagccttactaaaattgtataaattcattggatctaaattgattgtgatccatgacattttctttgttctttggtggtgtaggtcaacttttattaattagtttagaaaagtacaaaatgcaagtcaaatttggtgggctgtaatgagcctttgataagcatagccaaagagtcatatagaagggcttattaatgttattattgtaaggtacatgtaaaacaaatgaaaatttgttaatatcaagttatcattcttc

SEQ ID NO: 81 - protein, 301 aa, Solanum tuberosum
MNKGATGNQQLELPAGFRFHPTDDELVQHYLCRKCAGQPIAVSIITEIDLYKFDPWQLPEKALYGEKEWYFFSPRDRKYPNGSRPNRAAGTGYWKATGADKPVGKPKTLGIKKALVFYAGKAPRGIKTNWIMHEYRLANVDRSAGKNNNLRLDDWVLCRIYNKKGTLEKHYNVDNKETASFGEFDEEIKPKILPTQLAQMPPRPRSTPTNDYFHFESSESMTRMHTTNSSSGSEHVLSPCDKEVQSAPKWDEDHRNTLDFQLNYLDGLLNEPFETQMQQQSCNFDQFNNFQDMFFYMQKPY

SEQ ID NO: 82 - DNA, 1447 bp, Arabidopsis thaliana
cgattacaatcttgagcagacgaagaaaacccaaaaaaaatccagatccagctgaaattgaattttcaaccaacgaagaagagatttttccaagagcaacagacaagaagaagagaatgaagtcggagctaaatttaccagctgggttccgattccatccaacggacgaggagcttgtgaaattctacttgtgccggaaatgtgcttccgagcagatctcggctccggttatcgccgagattgatctctacaagttcaatccttgggagcttccagagatgtctctgtacggagagaaagagtggtacttcttctcacctagagatcggaaatacccaaacggttcgcgtcctaaccgggcagcaggaaccggttattggaaagctaccggagcagataaaccgattggtaaaccgaagacgttgggtatcaagaaagcactcgtcttctacgcagggaaagctccaaaagggattaagaccaattggataatgcatgagtatcgtctcgctaatgttgatagatcagcttctgttaacaaaaagaacaacctacgacttgatgattgggttttatgtcgaatatacaacaagaaaggaaccatggagaagtatttccccgcggatgagaagccgaggaccacgacaatggctgaacagtcatcatcaccttttgatacatcagactcgacttacccgacattgcaagaggatgattccagcagctcaggtggtcacggtcacgtggtgtcaccggatgttttggaggttcagagcgagcctaaatggggagagcttgaggatgctttggaagcttttgatacttcaatgtttggtagttccatggagttgttgcagcctgacgcttttgtccctcagttcttgtatcagtctgattatttcacttccttccaggatccgcctgagcagaaaccattcttgaattggagttttgctccacaggggtaaaaacggaagagaccaaaaaaggtgtttgctagtagtactgtgatgtgccagagagaagagtctcatctcaactcatccctggctcttagtagtaaaagaagattgtagaatgttaatagcttttagcatcaatgtctcattagcaggcacattcttgttctttcatgagaagtttatatgaaaactaaaaatttatattcaaattcttcaagatgttgcacttatgtagatactgatattaaataacaacctaacctttatgagatatcatgctctccggaagcattttttgatgagtatcatcagctgaatcgaggcgatttcctcacagctgttattcctatgtctctgagacttttgattctcgttttcttgacctgaggtttctttttggaagacttctctctttccttctgttcaagctgtgtggagggtttttcagatccattattcccacgaggagtcttcattttgggatc

SEQ ID NO: 83 - protein, 283 aa, Arabidopsis thaliana
MKSELNLPAGFRFHPTDEELVKFYLCRKCASEQISAPVIAEIDLYKFNPWELPEMSLYGEKEWYFFSPRDRKYPNGSRPNRAAGTGYWKATGADKPIGKPKTLGIKKALVFYAGKAPKGIKTNWIMHEYRLANVDRSASVNKKNNLRLDDWVLCRIYNKKGTMEKYFPADEKPRTTTMAEQSSSPFDTSDSTYPTLQEDDSSSSGGHGHVVSPDVLEVQSEPKWGELEDALEAFDTSMFGSSMELLQPDAFVPQFLYQSDYFTSFQDPPEQKPFLNWSFAPQG

SEQ ID NO: 84 - DNA, 1211 bp, Petunia x hybrida
  misc_feature (1006)..(1006): n is a, c, g, or t
  misc_feature (1131)..(1131): n is a, c, g, or t
  misc_feature (1154)..(1154): n is a, c, g, or t
  misc_feature (1157)..(1157): n is a, c, g, or t
  misc_feature (1187)..(1187): n is a, c, g, or t
  misc_feature (1194)..(1194): n is a, c, g, or t
  misc_feature (1199)..(1199): n is a, c, g, or t
cccattctcagtatctagacacccaaaaataaaaataaaaagatttattattttttcatcaagaaattcgttagaaaaatcaaaaaatgacaacagcagaattgcaattacctccagggtttagatttcacccaactgatgaagaacttgtgatgcactatttatgtagaaaatgtgcttcacaaccaattgctgtaccaattattgctgaaattgatctctacaaatatgacccatgggatcttcctgatttggcattgtatggggagaaagaatggtatttcttttcacctagggaccgaaagtatccgaacggttcacgaccaaatcgagcagctggaacaggttattggaaagccactggagctgataaaccaattggacatcctaaggcagttggaattaaaaaggcattggtgttttacgctggcaaggctccgaaaggcgagaaaacaaattggattatgcacgaatacagacttgctgatgttgatcgatctgctcgtaagaataacaatagcttaaggctagatgattgggttttgtgccgaatctacaacaaaaagggctcaattgaaaagaatcaactcaataacaagaaaataatgaatactagctatatggatatgacagtatcaagtgaagaagaccgaaagccagagattctaccaccgctaccacctcagcctgcgccgcaacagcaacaagtttataacgattttttctacctggatccatcagattcagtaccaaaaatccactcagattcaagctgctcggaacatgtggtttcaccagagttcacttgtgagagagaagttcagagcgaagccaagttaagtgagtgggaaaaagctgcccttgatcttccatttaattacatggatgccactactggagctaccacactggataatagccttttaggttcacagtttcagagcagttatcagatgtcgccattgcaggatatgttcatgcacctgcacaaacctttttaaggtcnaaagtgaaggaatcaatcattttacggccgcatgtttgttaaaatgagactaagttaaagttcccgtgacttgcgcacgttgcgggctgtttataggaattagttaccatccttttgggtttccncattgggcaatttgtttaaaacnacntttttgtgttatatagttttaataatgttnccccctnaattnatttaaaaaaaa

SEQ ID NO: 85 - protein, 304 aa, Petunia x hybrida
MTTAELQLPPGFRFHPTDEELVMHYLCRKCASQPIAVPIIAEIDLYKYDPWDLPDLALYGEKEWYFFSPRDRKYPNGSRPNRAAGTGYWKATGADKPIGHPKAVGIKKALVFYAGKAPKGEKTNWIMHEYRLADVDRSARKNNNSLRLDDWVLCRIYNKKGSIEKNQLNNKKIMNTSYMDMTVSSEEDRKPEILPPLPPQPAPQQQQVYNDFFYLDPSDSVPKIHSDSSCSEHVVSPEFTCEREVQSEAKLSEWEKAALDLPFNYMDATTGATTLDNSLLGSQFQSSYQMSPLQDMFMHLHKPF

SEQ ID NO: 86 - DNA, 1295 bp, Prunus mume
acacacagcacagtcgaatcaaacgacgccgttcagaatgtcctcctccgatttacagctgccgcccggcttcaggttccacccgacggacgaagagctcgtgaagcactacctctgccgcaaatgccagtcgcagccgatttcggtcccgataatcgccgaaatcgatctctacaaatacaacccctgggacctccctggtttggcgttgtacggtgagaaagagtggtatttcttttcgccgagggaccggaagtatccgaatggttcgaggccgaaccgggcggccgggagcggctattggaaggcgaccggagcggataagccgatcgggagcccgaagccagtcgggattaagaaggccctggttttctacgccggaaaagctccgagaggagagaagaccaattggattatgcacgagtatcgcctcgccgacgtcgaccgctcgcctcgcaaaaagagcagcagcctaaggttggacgattgggttctgtgtcgcatatacaacaaaaagggcaccgtcgagaaacagcagcagcagcaacaacagcaacaacagcaaacgacgagtcgtatgagtagcggctcggaattcgaggacaggaagccggagaatctggcgtgtcctccgccgccggctgcggtagcccccactcgcccgaacgactacgtgtacttcgacacgtcggactctgtgccgaggctgcacacggactcaagctgctcggagcacgtggtgtcgccggagttcacttgcgaggtgcagagcgagcccaagtggaaggagtgggagaaggccctcgattttaactacaattacatggacaccagtgtagagaacgggttcgggccgcagttccagagcgctaatcagatgtcgccgctgcaggatattttcatgtacctacagaagccgtattgattttgatgaagcggggcctacaattgcattgctatgagtcgccgcatcggacggcaacgggagacccaggtcgatgagagtgcgttttcgatgctgtgacaagggaaagggaagggggatttgcgtcgcggggtccaccatttgggcccaaggctgggtgatttgggagcgttgatataaagatgatatatatagatggaaaaaagatgatggggctggttttggaagatagaaatatgaagaagtttggtttttaatgtgtacagcatgtatgtatagatataaataggtaatgttgttcacatgatgattttgaagggccgtctaaatcgtaatatttgttctttgtgaaaaaaaaaaaaaaaaaaaa

SEQ ID NO: 87 - protein, 295 aa, Prunus mume
MSSSDLQLPPGFRFHPTDEELVKHYLCRKCQSQPISVPIIAEIDLYKYNPWDLPGLALYGEKEWYFFSPRDRKYPNGSRPNRAAGSGYWKATGADKPIGSPKPVGIKKALVFYAGKAPRGEKTNWIMHEYRLADVDRSPRKKSSSLRLDDWVLCRIYNKKGTVEKQQQQQQQQQQQTTSRMSSGSEFEDRKPENLACPPPPAAVAPTRPNDYVYFDTSDSVPRLHTDSSCSEHVVSPEFTCEVQSEPKWKEWEKALDFNYNYMDTSVENGFGPQFQSANQMSPLQDIFMYLQKPY

SEQ ID NO: 88 - DNA, 1211 bp, Brassica napus
atttcattaggattatattactagagacagatcctcgaatagaaaagaaaatgtcagaactacagctgcctccaggattccgatttcacccaaccgacgaagagctggtgatgcactatctctgccgcaaatgcgcctctcagtccatcgccgtccccatcatcgctgagatcgatctctacaaatatgatccttgggagcttcccggtttagccttgtacggtgagaaggaatggtatttcttctctccaagagacagaaaatatccgaatggttctcggccgaaccggtcagctggttcgggttactggaaagctactggagctgataaaccgatcggacttcctaaaccggttgggattaagaaggctctggttttctacgccgggaaagctccaaagggtgagaaaaccaattggatcatgcatgagtaccgtcttgccgacgttgaccgatcatcggctgctcgcaagaagaagaatagtctcaggctggatgattgggttctttgtcggatttacaacaaaaaaggagccatcgagaagcgaggaccaccaccaactccggttgtttacggcgacgaggtcgtggaggagaagccgaggctgtcggagatgggcatgcctcctccgccggtgatgccgaatgatttcgtgtactttgacacgtcggactcggtgccaaagctgcatacgacggagtcgagctgctcggagcaggtggtgtcgccggagttcacgagcgaggttcagagcgagcccaagtggaaggattggtcgggtgagaaaagtagccttgattttgggtttaattacatagatgccaccgcgttcgggggaggaggagggagcaatcagctgtttccgctacaggacatgttcatgtacaacatgcccaagccttattaggtgaaggcaaacgctcgtctatgggtatcacgagatcggttacggttacggtcggtcaatgagtgtgccgccattagatatttattaccatgatgtttgttgttcagtgttacttttattttctaagcggtcagattacgggaaatctctaatcggatggcggtcgatgtgtcattgtactagtgttgtttggtagaagaatccacatgtcttttcttttttgggctttagtggggcataaaagtcaaaagctaaggatatttgttattatctccttcgtaataatcaattaaatatttcttg

SEQ ID NO: 89 - protein, 285 aa, Brassica napus
MSELQLPPGFRFHPTDEELVMHYLCRKCASQSIAVPIIAEIDLYKYDPWELPGLALYGEKEWYFFSPRDRKYPNGSRPNRSAGSGYWKATGADKPIGLPKPVGIKKALVFYAGKAPKGEKTNWIMHEYRLADVDRSSAARKKKNSLRLDDWVLCRIYNKKGAIEKRGPPPTPVVYGDEVVEEKPRLSEMGMPPPPVMPNDFVYFDTSDSVPKLHTTESSCSEQVVSPEFTSEVQSEPKWKDWSGEKSSLDFGFNYIDATAFGGGGGSNQLFPLQDMFMYNMPKPY

SEQ ID NO: 90 - DNA, 1317 bp, Arabidopsis thaliana
atggactttgctctcttctcctcgatttcaatctttgagataaaccacaaagatcctccgattcgaaggtttataaaaactcaaaatcgaatcttatccacaagaaaacaacaaggtacttttccaaaaatgaaggcggagttgaatttgccggcgggattccgatttcatccgacggacgaagagcttgtcaagttctatctttgccggagatgtgcgtcagaaccgattaacgttccggttatcgcagagattgacttgtacaaattcaatccatgggagcttccagaaatggcgttgtacggtgagaaagaatggtacttcttctcgcatagagaccggaaatacccaaacgggtcgagaccaaaccgggcagctggaaccggttattggaaagcgactggagctgataaaccgatcggaaaaccgaagacgttagggattaagaaagcactcgtcttctacgcaggaaaagctccgaaagggattaaaacgaattggattatgcacgagtatcgtctcgctaatgtcgatcgatctgcttctaccaacaagaagaacaacttaagacttgatgattgggttttgtgtcggatatacaataagaaaggaacaatggagaagtatttaccggcggcggctgagaaaccgacggaaaagatgagtacgtcggactcaagatgctcaagtcacgtgatttcaccggacgtcacgtgttctgataactgggaggttgagagtgagcccaaatggattaatctggaagacgcgttagaggcatttaatgatgacacgtccatgtttagttccattggtttgttgcaaaatgacgcctttgttcctcagtttcagtaccagtcctccgatttcgtcgattcgtttcaggacccgttcgagcagaaaccgttcttgaattggaattttgctcctcaagggtaaaaataatcggcaaaaagttgaagcttttcagagtcttcgatcaccggcattgtgtcggatcctgacccggagaccaagtcgggtcatacgattacataatcgggttattgagatttccacatttggatttccgagactaaccaacttaacggattctggggtaattggggggttttgcacaggtgaatcacactgagtcagcaagtttcgattttttggttttgttttgtaatgattgattaaatgtctaaagatatcacgaagtagatacagaagaactgtaaaagcaattgtgaccaaccattatgaatcatatatatattcaatgaagcatgagcttatttcttctttaatgaagcaatgtacatttttctccaa

SEQ ID NO: 91 - protein, 312 aa, Arabidopsis thaliana
MDFALFSSISIFEINHKDPPIRRFIKTQNRILSTRKQQGTFPKMKAELNLPAGFRFHPTDEELVKFYLCRRCASEPINVPVIAEIDLYKFNPWELPEMALYGEKEWYFFSHRDRKYPNGSRPNRAAGTGYWKATGADKPIGKPKTLGIKKALVFYAGKAPKGIKTNWIMHEYRLANVDRSASTNKKNNLRLDDWVLCRIYNKKGTMEKYLPAAAEKPTEKMSTSDSRCSSHVISPDVTCSDNWEVESEPKWINLEDALEAFNDDTSMFSSIGLLQNDAFVPQFQYQSSDFVDSFQDPFEQKPFLNWNFAPQG

SEQ ID NO: 92 - DNA, 1340 bp, Capsicum annuum
gcaggcaaacacacaaagcaacagctgcaaacagcaaaagaaacacaacggagatttattcagacgcctttgatcttcagataagaaacaggcaagttaccaagagtgatatttattgagacgtccttgattttagctgggaaacaggcaagttttacaaagagaatgatcaaaggaatcgttggaaatcagcaattggggttacctgcaggatttcgatttcaccctactgatgaagagttggtgcagcattatttgtgcaggaaatgtgcaggacagagtatttctgtttcgattatagctgaaattgatctttacaagtttgatccttggcagttgcctgaaaaggcattatacggtgaaaaagagtggtattttttctcccaagaggatagaaaatacccgaacggttcaaggccgaaccgggcagcaggaaccggttattggaaagcgaccggagcagataaaccggtgggaaaaccgaaaacattagggataaaaaaggcacttgtattttatgctggaaaagcaccaagaggtataaagactaattggattatgcatgagtatcgacttgctaatgtggacagatctgctggaaagagtaataacttgaggcttgatgattgggtattgtgtcgaatatacaacaagaaggggcacactttgagaagtattacaatgtgggccagcaagagaggtgagagttttggggaatttgaggatgaaataaaaccaaaaatatttccaacacaactagcaccggctccggggcagtggcccccacgaccccaatcaacccccgcaagcgactacttcaactttgaaacatccgagtcgatgactactactaggatgcacacgacaaactcgagctctggctcagagcatgtcttgtcgtcatgtgacaaggaggttcagagtgcacctaaatgggacgaccttggaaccgccgcccttgatttccagataaattatttggatggtttgctgaacgacccttttgaaatccaaatgcagcagcaaaattgcaacattgaccagttcaacactttccaggacatgttcctatacatgcaaaaaccttagtagaattgtataaatcatgtgattcaaattgattttgatccatgacattttgttggttctttggtggtgtaggtcaactttttattgattagattagaaaagtagaaatgctattcaaatttggtgggctatagctcaaatgagccttcgctagatagccaaaggattatgtagaaggcttattgtaaggtacaggtaaaacaaatgaaaatttgttaatatcaatttatcattcttcaaaaaaaaaaaaa

SEQ ID NO: 93 - protein, 307 aa, Capsicum annuum
MIKGIVGNQQLGLPAGFRFHPTDEELVQHYLCRKCAGQSISVSIIAEIDLYKFDPWQLPEKALYGEKEWYFFSQEDRKYPNGSRPNRAAGTGYWKATGADKPVGKPKTLGIKKALVFYAGKAPRGIKTNWIMHEYRLANVDRSAGKSNNLRLDDWVLCRIYNKKGHTLRSITMWASKRGESFGEFEDEIKPKIFPTQLAPAPGQWPPRPQSTPASDYFNFETSESMTTTRMHTTNSSSGSEHVLSSCDKEVQSAPKWDDLGTAALDFQINYLDGLLNDPFEIQMQQQNCNIDQFNTFQDMFLYMQKP

SEQ ID NO: 94 - DNA, 1316 bp, Arabidopsis thaliana
aagtttcaaaaacgccaagtttcagaggtagagagagagatactacaattgattaggataggatcaggatcatcctcaacaacctcctcctaattcctcctccattcatagtaacaataatattaagaaagagggtaaactatgtcagaattattacagttgcctccaggtttccgatttcaccctaccgatgaagagcttgtcatgcactatctctgccgcaaatgtgcctctcagtccatcgccgttccgatcatcgctgagatcgatctctacaaatacgatccatgggagcttcctggtttagccttgtatggtgagaaggaatggtacttcttctctcccagggacagaaaatatcccaacggttcgcgtcctaaccggtccgctggttctggttactggaaagctaccggagctgataaaccgatcggactacctaaaccggtcggaattaagaaagctcttgttttctacgccggcaaagctccaaagggagagaaaaccaattggatcatgcacgagtaccgtctcgccgacgttgaccggtccgttcgcaagaagaagaatagtctcaggctggatgattgggttctctgccggatttacaacaaaaaaggagctaccgagaggcggggaccaccgcctccggttgtttacggcgacgaaatcatggaggagaagccgaaggtgacggagatggttatgcctccgccgccgcaacagacaagtgagttcgcgtatttcgacacgtcggattcggtgccgaagctgcatactacggattcgagttgctcggagcaggtggtgtcgccggagttcacgagcgaggttcagagcgagcccaagtggaaagattggtcggccgtaagtaatgacaataacaatacccttgattttgggtttaattacattgatgccaccgtggataacgcgtttggaggaggagggagtagtaatcagatgtttccgctacaggatatgttcatgtacatgcagaagccttactagaagggaattcctttcctgccgccgaaacgcaacgcaaaacgaccctcgtttttgcgtttatggcaacacgagaccgttttatatggtcaatgagtgtgccgattcggccattagatttctgttcagtcttcgtttattctatagaccgtccgatttcagatcatccctaatcggacggtggtcgttggatgtatcagtagtgtattactgtgttaggtagaagaaaatccacttgttcttaaattggcataaaagtcagaagctaatatttatatgtgccgcaatcaatttaatattttctgtct

SEQ ID NO: 95 - protein, 289 aa, Arabidopsis thaliana
MSELLQLPPGFRFHPTDEELVMHYLCRKCASQSIAVPIIAEIDLYKYDPWELPGLALYGEKEWYFFSPRDRKYPNGSRPNRSAGSGYWKATGADKPIGLPKPVGIKKALVFYAGKAPKGEKTNWIMHEYRLADVDRSVRKKKNSLRLDDWVLCRIYNKKGATERRGPPPPVVYGDEIMEEKPKVTEMVMPPPPQQTSEFAYFDTSDSVPKLHTTDSSCSEQVVSPEFTSEVQSEPKWKDWSAVSNDNNNTLDFGFNYIDATVDNAFGGGGSSNQMFPLQDMFMYMQKPY

SEQ ID NO: 96 - DNA, 1423 bp, Lycopersicon esculentum
ctaaattccttcttgtttatcattttctctcttcccaaaaaaaaaatcccaaaatttaatcataatacaattcgaatttatcaacctcgtactacgtacatatttttgttggtacgtaaaatactgaattcaggtcaactcaaacatcgtaaattgtgatttctttatggaaagtacggattcatcaaccgggacacgtcatcagcctcaactcccaccggggtttcgattccacccgacggacgaagaactcatcgtccactacctcaaaaaacgagtcgccggcgctccgattccggtggatattattggtgaaattgatctttataagtttgatccatgggaactccctgctaaggcaatattcggagagcaagaatggttcttttttagtccaagagatagaaaatatcctaacggggcgaggccaaatcgggctgcaacatcgggttattggaaggctaccggaaccgacaagccggtttttacttccggtggaacacaaaaggttggggtaaaaaaggcgctcgttttttacggcggtaaaccaccaaaaggggtaaaaactaattggatcatgcatgaatacagagttgtagaaaataaaacaaataacaagccacttggttgtgataatattgttgccaacaaaaaaggatctttgaggctagatgattgggttttatgtcgaatttacaagaagaataacacacaaaggtccatagatgatttgcatgatatgttgggatcgataccacaaaatgtaccaaattcaatattacaaggaataaagccttcaaactatggtacaatattgctcgaaaatgaatcgaatatgtacgatggaattatgaataacacgaacgatattatcaacaataataatagatccattccacaaatatcgtcaaagagaacgatgcatggaggtttgtattggaataacgacgaagcaacaacaacaacaacaactattgataggaaccattctccaaatacaaaaaggttccttgttgagaacaacgaggacgatggacttaacatgaataatatttcgcgaattacaaatcatgaacaaagtagctccattgccaatttcctgagccagtttcctcaaaatccttcgattcaacaacaacaacaacaacaagaagaagtattgggatctcttaatgatggggtcgtctttcgacaaccttataatcaagttactggcatgaattggtactcttaaagatataaaaaggcaaaaaatagttagccctgtaaaatcaatcgatcaatcaatcatagatatattatatatggatttcgttatattttacttttagttagaattaatatatagaatatcttctatctcacattaacaaataagaacatttataacaaaaaaaaaaaaaaaaaaaaaaaaaaaaaaaaa

SEQ ID NO: 97 - protein, 355 aa, Lycopersicon esculentum
MESTDSSTGTRHQPQLPPGFRFHPTDEELIVHYLKKRVAGAPIPVDIIGEIDLYKFDPWELPAKAIFGEQEWFFFSPRDRKYPNGARPNRAATSGYWKATGTDKPVFTSGGTQKVGVKKALVFYGGKPPKGVKTNWIMHEYRVVENKTNNKPLGCDNIVANKKGSLRLDDWVLCRIYKKNNTQRSIDDLHDMLGSIPQNVPNSILQGIKPSNYGTILLENESNMYDGIMNNTNDIINNNNRSIPQISSKRTMHGGLYWNNDEATTTTTTIDRNHSPNTKRFLVENNEDDGLNMNNISRITNHEQSSSIANFLSQFPQNPSIQQQQQQQEEVLGSLNDGVVFRQPYNQVTGMNWYS

SEQ ID NO: 98 - DNA, 1691 bp, Arabidopsis thaliana
aaaagatcgacgaacataaaaacaaaaacatataatttgggtttttagagttcgaaacttgaaatctttttttttttggttgctgaggaatcgaagtagaagagtataaatgggtgttagagagaaagatccgttagcccagttgagtttgccaccaggttttagattttatccgacagatgaagagcttcttgttcagtatctatgtcggaaagttgcaggctatcatttctctctccaggtcatcggagacatcgatctctacaagttcgatccttgggatttgccaagtaaggctttgtttggagagaaggaatggtatttctttagcccaagagatcggaaatatccgaacgggtcaagacccaatagagtagccgggtcgggttattggaaagcaacgggtactgacaaaattatcacggcggatggtcgtcgtgtcgggattaaaaaagctctggtcttttacgccggaaaagctcccaaaggcactaaaaccaactggattatgcacgagtatcgcttaatagaacattctcgtagccatggaagctccaagttggatgattgggtgttgtgtcgaatttacaagaaaacatctggatctcagagacaagctgttactcctgttcaagcttgtcgtgaagagcatagcacgaatgggtcgtcatcgtcttcttcatcacagcttgacgacgttcttgattcgttcccggagataaaagaccagtcttttaatcttcctcggatgaattcgctcaggacgattcttaacgggaactttgattgggctagcttggcaggtcttaatccaattccagagctagctccgaccaatggattaccgagttacggtggttacgatgcgtttcgagcggcggaaggtgaggcggagagtgggcatgtgaatcggcagcagaactcgagcgggttgactcagagtttcgggtacagctcgagtgggtttggtgtttcgggtcaaacattcgagtttaggcaatgagagagatgtgaagttactgatgggtgaaaaaagtaaaaaaaaaacttggagatagtagagtggcaattgatgtaaataatagggatttatatggggcttttaccgattcggtgaggcttaggattccacaaaggaaaaaggctcgactggggactagtttgatccaacttgacggcccacaaatgtgtaatgtttctcaacggagagaaaaataaatggttaccaatatttttacaccggttatgtgttgataccatttgcacaaaacggtttaagttctgaattgaataacttaacacccaaaatttggtaaaaagcttaatacaaaaagttcaaaggcattttcgcttactgcgacactcggagttgcagagtactctacgtaacagactctgttcatagagtttgcggcaccggtggtgggacattcttgcggacacagtatgtacttttggaagcatcgttcctaagggttgctgcagtaaactccttgtgacttggctcgcaagaaacataacatggccgcaagaaaaaacagcattaacgaagaggtgtttgagatcttcatgtctagtttattcttcctgttttattatgtgtcgactggtgtcaaaagaaacgtgttgattgtgaatttgtagacgccactctgtaaatttatttaaaataaactattttacttcacgtt

SEQ ID NO: 99 - protein, 297 aa, Arabidopsis thaliana
MGVREKDPLAQLSLPPGFRFYPTDEELLVQYLCRKVAGYHFSLQVIGDIDLYKFDPWDLPSKALFGEKEWYFFSPRDRKYPNGSRPNRVAGSGYWKATGTDKIITADGRRVGIKKALVFYAGKAPKGTKTNWIMHEYRLIEHSRSHGSSKLDDWVLCRIYKKTSGSQRQAVTPVQACREEHSTNGSSSSSSSQLDDVLDSFPEIKDQSFNLPRMNSLRTILNGNFDWASLAGLNPIPELAPTNGLPSYGGYDAFRAAEGEAESGHVNRQQNSSGLTQSFGYSSSGFGVSGQTFEFRQ

SEQ ID NO: 100 - DNA, 1335 bp, Triticum aestivum
attgattccgttcccacctgctcaccgtcgccatgccaatgggcagcagcagcgccgccatgcccgccctccctcccggcttccggttccaccccaccgacgaggagctcatcgtccactacctcggcaggcaggccgcgtccatgcccagccccgtgcccatcatcgccgaggtcaacatctacaagtgcaacccatgggacctccccggcaaggccttgttcggggagaatgagtggtacttcttcagcccccgggatcgcaagtaccccaacggcgcgcgccccaaccgcgccgccgggtccggctactggaaggccaccggcaccgacaaggccatcctgtccacgccggccaacgagagcatcggcgtcaagaaggcgctcgtcttctaccggggcaagccgcccaagggcgtcaagaccgactggatcatgcacgagtaccgcctcaccgccgccgacaaccggaccaccaagcgcagaggatcctccatgaggctggatgactgggtgctgtgtaggatccacaagaagtgcaacaacttgcacaacttctcctcctctgaccaggaacaggagcacgagcaggagagctccaccaccgtggaggactcgcacaacaaccacaccgtgtcgtcgcccaagtcggaggccttcgacggcgacggcgacgaccagctgcagctgcagcagttccgccccatggcgatcgccaagtcgtgctccctcaccgacctgctcaacaccgtcgactacgccgcgctctcgcacctcctcctcgacggcgccggcgccggcgcctcgtcgtcggacgccggagcagactaccagctgccgccggaaaacccgctcatctactcgcagcctccatggcaacaaacgctacactataataacaataacaatggctacgtgaacatcgacaccatcgacgtgcctcagatacccgaggcccgtgtagatgactacggcatgaatggcgataggtacaacggcatgaagaggaagaggtccagcggcagtttgtactgcagccagctgcagctcccggcggatcagtacagcggcatgctgatccatccgttcctcagccagcagctgcacatgtgaagaaccagagagcttggatcgaagagatcatcattgttccatttgaacttgctgtagatcgaggggatcccccgctgtggcagataggcagggatctagcttgcttgctgtgtcgtgaccgaccgaccgataagaacggacaaatttcagaattcttggtgtagcacaaaagctgtaaattacgggggtttattgtgaaataaataaatccagtattattaag

SEQ ID NO: 101 - protein, 359 aa, Triticum aestivum
MPMGSSSAAMPALPPGFRFHPTDEELIVHYLGRQAASMPSPVPIIAEVNIYKCNPWDLPGKALFGENEWYFFSPRDRKYPNGARPNRAAGSGYWKATGTDKAILSTPANESIGVKKALVFYRGKPPKGVKTDWIMHEYRLTAADNRTTKRRGSSMRLDDWVLCRIHKKCNNLHNFSSSDQEQEHEQESSTTVEDSHNNHTVSSPKSEAFDGDGDDQLQLQQFRPMAIAKSCSLTDLLNTVDYAALSHLLLDGAGAGASSSDAGADYQLPPENPLIYSQPPWQQTLHYNNNNNGYVNIDTIDVPQIPEARVDDYGMNGDRYNGMKRKRSSGSLYCSQLQLPADQYSGMLIHPFLSQQLHM

SEQ ID NO: 102 - DNA, 1423 bp, Triticum aestivum
gcagcatttttatgcagtagccatcttctcctcctcctccccccgccttccagctagccacctagctcactatcacatcatccagcagcccacaccaactcatattgattccgttcccacctgctcgccatcgccagccatgccaatgggcagcagcgccgccatgcccgccctccctcccggcttccggttccaccccaccgacgaggagctcatcgtccactacctccgcaggcaggccgcgtccatgcccagccccgtgcccatcatcgccgaggtcaacatctacaagtgcaacccatgggacctccccggcaaagctttgttcggggagaatgagtggtacttcttcagcccccgggatcgcaagtaccccaacggcgcgcgcccgaaccgcgccgccgggtccggctactggaaggccaccggcaccgacaaggccatcctgtccacgccggccaacgagagcatcggggtcaagaaggcgctcgtgttctacaggggcaagccgcccaagggcgtcaagaccgactggatcatgcacgagtaccgcctcaccgcagccgacaaccggaccaccaagcgcagaggatcctccatgaggctggatgactgggtgctgtgtaggatccacaagaagtgcggcaacttgcccaacttctcctcctctgaccaggaacaggagcatgagcaggagagctccaccgtggaggactcgcagaacaaccacaccgtgtcgtcgcccaagtccgaggccttcgacggcgacggcgacgaccacctccagttgcagcagttccgccccatggcgatcgccaagtcgtgctccctcaccgacctgctcaacaccgtcgactacgccgcgctctcgcacctcctcctcgacggcgccggcgcctcgtcgtcggacgccggagcagactaccagctgcctcccgaaaacccactcatctactcgcagcctccatggcaacaaacgctacactataataacaacaacggctacgtgaacaacgagaccatcgacgtgcctcagctacccgaggcgcgcgtagatgactacggcatgaatggcgataagtataacggcatgaagaggaagagatccagcggcagcttgtactgcagccagctgcagctcccagcggatcagtacagcggcatgctgatccatccgttcctcagccagcagctgcacatgtgaagaaccagagagcttgggtcgaagagatcatcattgttccatttgaacttgctgtagatcgagaggatcccccgctgtggcagataggcagggatctagctagcttgctgtgtcgtgaacgaccgaccgataagaacggacaaatttcagaattcttggtgtagcacaaagctgtaaattacgggggtttattgtgaaataaattaatccagtattatc

SEQ ID NO: 103 - protein, 354 aa, Triticum aestivum
MPMGSSAAMPALPPGFRFHPTDEELIVHYLRRQAASMPSPVPIIAEVNIYKCNPWDLPGKALFGENEWYFFSPRDRKYPNGARPNRAAGSGYWKATGTDKAILSTPANESIGVKKALVFYRGKPPKGVKTDWIMHEYRLTAADNRTTKRRGSSMRLDDWVLCRIHKKCGNLPNFSSSDQEQEHEQESSTVEDSQNNHTVSSPKSEAFDGDGDDHLQLQQFRPMAIAKSCSLTDLLNTVDYAALSHLLLDGAGASSSDAGADYQLPPENPLIYSQPPWQQTLHYNNNNGYVNNETIDVPQLPEARVDDYGMNGDKYNGMKRKRSSGSLYCSQLQLPADQYSGMLIHPFLSQQLHM

SEQ ID NO: 104 - DNA, 891 bp, Saccharum officinarum
atgagcggcggcggtcaggatctgcagctgccgccggggttccggttccacccgacggacgaggagctggtgatgcactacctctgccgccgctgcgccagcctgcccatcgccgtccccatcatcgccgagatcgacctctacaagttcgatccatggcagctccccaggatggcgctgtacggcgagaaggagtggtacttcttctccccgcgggaccgcaagtacccgaacgggtccaggcccaaccgcgccgccgggtccggctactggaaggccaccggcgccgacaagcccgtgggcacgcccaagccgctcgccatcaagaaggcgctcgtcttctacgccggcaaggcgcccaagggcgagaagaccaactggatcatgcacgagtaccgcctcgccgacgtcgaccgctccgcccgcaagaagaacagcctcaggttggatgactgggtcctgtgccgcatctacaacaagaagggagggctggagaagccggcggcggcgtcctccggcgaccacaagccgatggtgttcgccgcgggcgcggtgagctccccgccggagcagaagccgttcgtggcgacgccgggcgggctgccccccgccgcgttcacggcggacctggcggcgtactacgaccggccgtcggactcgatgccgcggctgcacgcggactccagctgctcggagcaggtgctgtcgccggagcagctggcgtgcgaccgggaggtgcagagccagcccaagatcagcgagtgggagcgcaccttcgcctccgaccccgtcaaccccgctggctccatgctcgtcgaccccgtcgtcggtggccacgccggcgacccgctgctgcaggacatcctcatgtactggggcaagccgttctag

SEQ ID NO: 105 - protein, 296 aa, Saccharum officinarum
MSGGGQDLQLPPGFRFHPTDEELVMHYLCRRCASLPIAVPIIAEIDLYKFDPWQLPRMALYGEKEWYFFSPRDRKYPNGSRPNRAAGSGYWKATGADKPVGTPKPLAIKKALVFYAGKAPKGEKTNWIMHEYRLADVDRSARKKNSLRLDDWVLCRIYNKKGGLEKPAAASSGDHKPMVFAAGAVSSPPEQKPFVATPGGLPPAAFTADLAAYYDRPSDSMPRLHADSSCSEQVLSPEQLACDREVQSQPKISEWERTFASDPVNPAGSMLVDPVVGGHAGDPLLQDILMYWGKPF

SEQ ID NO: 106 - DNA, 1817 bp, Oryza sativa
aactagcttagctagacagcgtgtgttggtggtggtggtggtgtgtgtgtgtgtgaggagggtgatcgatcgatcgagcgatggagagcccggactcgtcgtccggctcggcgccaccgcgagtactacggcggcaacagcagcagccgggctcggcgccggagctgccgccggggttccggttccacccgacggacgaggagctggtggtgcactacctcaagaagaaggccgcctccgttccgctccccgtcaccatcatcgccgaggtcgatctctacaagttcgatccctgggatctccccgagaaggcgaacttcggggagcaggagtggtatttcttcagcccgagggaccacaagtacccgaacggggcgcggccgaaccgggcggcgacgtcggggtactggaaggccaccggcaccgacaagcccatcatgtcgtcggggagcacccgcgagaaggtcggcgtgaagaaggcgctcgtgttctaccggggcaagccacccaagggcgtcaagactaactggatcatgcacgagtaccgtctcacggacacgtctagctccgccgccgccgtcgctacgaccaggcggccgccgccgcccatcaccggcggtagcaagggcgccgtctctctcaggctggatgactgggtgctgtgccgcatatacaagaagacgaacaaggccggtgcggggcagaggagcatggagtgcgaggactccgtggaggacgcggtggccgcgtacgcgccgtcgtcgcagcagcatgccacggctgctgctggcatggccggttcggacggcgccggaggagttgctgcagcgcacggcggcgactacagttcactgctccatcacgacagccacgaggacaccttcctcgtaaacggcctgctcaccgcggaggacgccgccggcctctcgaccggcgccagctctctcagccagctcgccgcggcggcgagggcggcggcgacaccgtgcgacgccaccaagcagcttcttgctccgtctccaaccccattcaactggttcgaggcattccttccacgggccaaggagtttcctagtgggctaagcaggagtagcagagacatcggcgacatgtcgctgtcatcgacggtggacaggagcctgtctgaggctggcgccgtggccattgacaccggcgacgccgccaatggcgcaaacactatgcctgcatttatcaatcctctcggcgtgcagggtgcaacctaccaacaacaccaagccatcatgggtgcctcgttgccatcggagtcagcagcagcagcagccgcctgcaatttccagcatccgttccaactctccagggtgaattgggattcctgaataaaaggtgccggcattatgcatacacatatatgcacatgcatacatgcatggcttttcaagtagtagcacaacattactagtaattaatcacactaatgtgtgtggcagtcgcattcagtgagcactgatcgagtagttgcatgaacacaacactaatgcatgcactacatatatatggccgcattgctcctagggcacgtacctgtacgaactaggtaagtgacctaaccagctagatcatgttcagaataaggagaagaagccgcatgcaaacacgtagatcatatggctttgccttcacatgcgtttgcatcatatatatcgcattcagaaagtagtgctgcagctaacacatagatatggtgttagcttcatgcgtttgtaccatatatagcggatgcagaaagtagctagttgcactgttcatcattatcccatgagatatgaactttatat

SEQ ID NO: 107 - protein, 425 aa, Oryza sativa
MESPDSSSGSAPPRVLRRQQQQPGSAPELPPGFRFHPTDEELVVHYLKKKAASVPLPVTIIAEVDLYKFDPWDLPEKANFGEQEWYFFSPRDHKYPNGARPNRAATSGYWKATGTDKPIMSSGSTREKVGVKKALVFYRGKPPKGVKTNWIMHEYRLTDTSSSAAAVATTRRPPPPITGGSKGAVSLRLDDWVLCRIYKKTNKAGAGQRSMECEDSVEDAVAAYAPSSQQHATAAAGMAGSDGAGGVAAAHGGDYSSLLHHDSHEDTFLVNGLLTAEDAAGLSTGASSLSQLAAAARAAATPCDATKQLLAPSPTPFNWFEAFLPRAKEFPSGLSRSSRDIGDMSLSSTVDRSLSEAGAVAIDTGDAANGANTMPAFINPLGVQGATYQQHQAIMGASLPSESAAAAAACNFQHPFQLSRVNWDS

SEQ ID NO: 108 - DNA, 1218 bp, Medicago truncatula
atgggaaccccacagaccaatttgccaccaggttttaggttccaccctactgatgcagaactcattcttcactaccttaggaaaaaaattgcctccattcccttgcctgtttccatcattgctgaagttgatatttataagttggatccttgggatttaccagctaaggcttcatttggtgagaaagaatggtacttttttagtcctagagatagaaagtacccaaacggtgcaaggccaaacagggcagctgcttcagggtattggaaagccactggcactgataagaccatagtggcatcattgccatgtggaggaggaagatcacaagagaacattattggtgtcaaaaaggctcttgttttttacaaaggaaaacccccaaagggtattaagactaattggatcatgcatgaatatcgtcttgttgacaacaataaacctattaagctcaaagattcttccatgaggttggatgattgggtgctatgccgaatttacaagaaatcaaaatgtgcactaacttcaacagaatcatcagaaactatggtaggtgaagtggaacatgcagaagagacacaattccaagaaaccctatttccaatcaccaaaaacacaacctcacctcttcaaaacacactcatgtctcaaaaatcagtgtccttttcaaacctattagatgctatggactactccatgttaagcagcttcttatctgaaaattccaacaacccatcaggaattggaacaagttcaggtttcaacactgaaaattttaaccaacaacaatcttcccatatcaacacttgcaacaattacatgtctcagaagaatcctcaatccaacactttaaagcaccagctttcaaacgtagatgaagacatgttatacccatcaaagaagtacttgagttcctcttgcaattttcctaacatcaattctcagtatgaaaactaccttatgaagcaatctttgatgaatcaacaattgcttttaggtcctcatcatcaatatcaaggctaatccaaaataccacaaaaattaagtggtaccaaaaaaaaaaagattatgaaatagaaaagttaagtaagatttctagaagttgggcccaccaaattacaccaatgtcatcattaagtaaggattgctaatttaatagtagtgcacaaaatatagtgtgttctattttgtccattttaattttttttctaggaattg

SEQ ID NO: 109 - protein, 340 aa, Medicago truncatula
MGTPQTNLPPGFRFHPTDAELILHYLRKKIASIPLPVSIIAEVDIYKLDPWDLPAKASFGEKEWYFFSPRDRKYPNGARPNRAAASGYWKATGTDKTIVASLPCGGGRSQENIIGVKKALVFYKGKPPKGIKTNWIMHEYRLVDNNKPIKLKDSSMRLDDWVLCRIYKKSKCALTSTESSETMVGEVEHAEETQFQETLFPITKNTTSPLQNTLMSQKSVSFSNLLDAMDYSMLSSFLSENSNNPSGIGTSSGFNTENFNQQQSSHINTCNNYMSQKNPQSNTLKHQLSNVDEDMLYPSKKYLSSSCNFPNINSQYENYLMKQSLMNQQLLLGPHHQYQG

SEQ ID NO: 110 - protein, 6 aa, Artificial sequence
  motif I
  VARIANT (1)..(1): /replace="Pro" /replace="Ser" /replace="Asn"
  VARIANT (2)..(2): /replace="Leu" /replace="Ile" /replace="Ala"
  VARIANT (3)..(3): /replace="Ser" /replace="Asp" /replace="Val" /replace="Gln"
  VARIANT (4)..(4): /replace="Ile"
  VARIANT (6)..(6): /replace="Thr" /replace="Gly"
AVPVIA

SEQ ID NO: 111 - protein, 6 aa, Artificial sequence
  motif II
  VARIANT (2)..(2): /replace="Ser"
  VARIANT (3)..(3): /replace="Gln" /replace="Ala"  /replace="Val"
  VARIANT (6)..(6): /replace="Ser"
NGSRPN

SEQ ID NO: 112 - protein, 7 aa, Artificial sequence
  motif III
  VARIANT (1)..(1): /replace="Tyr"
  VARIANT (2)..(2): /replace="Lys"
  VARIANT (3)..(3): /replace="Ile"
  VARIANT (4)..(4): /replace="His" /replace="Phe"
  VARIANT (5)..(5): /replace="Lys"
  VARIANT (7)..(7): /replace="Asn" /replace="Cys" /replace="Ser" /replace="Thr"
CRLYNKK

SEQ ID NO: 113 - protein, 7 aa, Artificial sequence
  motif IV
  VARIANT (2)..(2): /replace="Gln" /replace="Thr"
  VARIANT (6)..(6): /replace="Val"
  VARIANT (7)..(7): /replace="Arg" /replace="Lys"
NEWEKMQ

SEQ ID NO: 114 - protein, 10 aa, Artificial sequence
  motif V
  VARIANT (4)..(4): /replace="Ala"
  VARIANT (10)..(10): /replace="Asp"
WGETRTPESE

SEQ ID NO: 115 - protein, 10 aa, Artificial sequence
  motif VI
  VARIANT (1)..(1): /replace="Leu"
  VARIANT (4)..(4): /replace="Glu"
  VARIANT (6)..(6): /replace="Arg" /replace="Ala" /replace="Val"
  VARIANT (7)..(7): /replace="Val" /replace="Ala" /replace="Gln" /replace="Arg"
  VARIANT (8)..(8): /replace="Glu"
  VARIANT (9)..(9): /replace="Glu" /replace="Leu"
  VARIANT (10)..(10): /replace="Gly" /replace="Asp"
VPKKESMDDA

SEQ ID NO: 116 - protein, 10 aa, Artificial sequence
  motif VII
  VARIANT (2)..(2): /replace="Tyr"
  VARIANT (5)..(5): /replace="Ile"
  VARIANT (7)..(7): /replace="Ser"
  VARIANT (8)..(8): /replace="Met" /replace="Pro"
  VARIANT (9)..(9): /replace="Tyr"
  VARIANT (10)..(10): /replace="Asn"
SLDDLQGLGS

SEQ ID NO: 117 - protein, 14 aa, Artificial sequence
  motif VIII
  VARIANT (3)..(3): /replace="Val" /replace="Ile"
  VARIANT (5)..(5): /replace="Lys"
  VARIANT (6)..(6): /replace="Ile" /replace="Ala"
  VARIANT (8)..(8): /replace="Ala" /replace="Ser"
  VARIANT (9)..(9): /replace="Glu"
  VARIANT (12)..(12): /replace="Gly"
DSMPRLHTDSSCSE

SEQ ID NO: 118 - DNA, 20 bp, Artificial sequence
  primer
ccaacactagtaggataaag

SEQ ID NO: 119 - DNA, 20 bp, Artificial sequence
  primer
accactgggctaattaatta

SEQ ID NO: 120 - DNA, 20 bp, Artificial sequence
  primer
ggtcgacccacgcgtccgct

SEQ ID NO: 121 - DNA, 20 bp, Artificial sequence
  primer
aactgaagtacccgttctta

SEQ ID NO: 122 - DNA, 20 bp, Artificial sequence
  primer
atcctccacaagagaaacta

SEQ ID NO: 123 - DNA, 20 bp, Artificial sequence
  primer
agtacagtgtagcacaataa

SEQ ID NO: 124 - DNA, 52 bp, Artificial sequence
  primer
ggggacaagtttgtacaaaaaagcaggcttaaacaatggggatggggatgag

SEQ ID NO: 125 - DNA, 47 bp, Artificial sequence
  primer
ggggaccactttgtacaagaaagctgggttcgatcaccacctgttcg

SEQ ID NO: 126 - DNA, 51 bp, Artificial sequence
  primer
ggggacaagtttgtacaaaaaagcaggcttaaacaatggagtgcggtggtg

SEQ ID NO: 127 - DNA, 50 bp, Artificial sequence
  primer
ggggaccactttgtacaagaaagctgggtgtcacgttccgttaattagaa

SEQ ID NO: 128 - DNA, 48 bp, Artificial sequence
  primer
ggggacaagtttgtacaaaaaagcaggcttaaacaatgccgagcagcg

SEQ ID NO: 129 - DNA, 48 bp, Artificial sequence
  primer
ggggaccactttgtacaagaaagctgggtctactgcatctgcagatga

SEQ ID NO: 130 - DNA, 48 bp, Artificial sequence; identical to SEQ ID NO: 129
  primer

SEQ ID NO: 131 - DNA, 1100 bp, Oryza sativa
catgtgcggcggcgccatcctctccgacctcatcccgccgccgcggcgggtcaccgccggcgacctctggctggagaagaccaagaagcagcagcagcagaagaagaagaacaagggcgcgaggaggctgccactgcgccaagaggaggaggatgatttcgaggccgacttcgaggagttcgaggtggattccggcgagtgggaggtggagtccgacgccgacgaggccaagccgctcgccgcgccccggagcggcttcgctaaaggtggattgaaaaacactactgttgctggtgctgatgggcctgcagcaaggtctgctaaaaggaagagaaagaaccaattcaggggtatccgccagcggccatggggcaaatgggctgcggaaatcagagatcctcgcaaaggtgtccgcgtctggcttggcaccttcaactctcctgaggaagctgccagagcttatgatgctgaagcacgaaggattcgaggcaagaaggccaaggtcaatttcccagatggggctccagtggcttctcagaggagtcatgctgagccctcctccatgaacatgcctgctttcagcatcgaagagaagccggccgtcatgtcagcaggcaacaaaaccatgtacaacacaaatgcttatgcctaccctgctgttgagtacaccttacaggagccatttgtgcagattcagaatgtctcatttgttcctgcaatgaacgcgattgaggatactttcgtgaacctgtcctctgatcaagggagcaactcctttggttgctcggactttagccaggagaatgatatcaagacccctgacataacttccatgcttgcaccgaccatgacaggtgttgatgactccgcattcctccagaacaatgccagtgatgcaatggtacctcctgtgatggggaatgctagcattgatcttgctgacctggagccgtacatgaaatttctgatcgatggtggttcggatgagtcgattgacacccttctgagctctgatggatctcaggatgtggccagtagcatggacctttggagcttcgatgacatgcccgtgtcggccgagttctactgaggggtttggg

SEQ ID NO: 132 - protein, 362 aa, Oryza sativa
MCGGAILSDLIPPPRRVTAGDLWLEKTKKQQQQKKKNKGARRLPLRQEEEDDFEADFEEFEVDSGEWEVESDADEAKPLAAPRSGFAKGGLKNTTVAGADGPAARSAKRKRKNQFRGIRQRPWGKWAAEIRDPRKGVRVWLGTFNSPEEAARAYDAEARRIRGKKAKVNFPDGAPVASQRSHAEPSSMNMPAFSIEEKPAVMSAGNKTMYNTNAYAYPAVEYTLQEPFVQIQNVSFVPAMNAIEDTFVNLSSDQGSNSFGCSDFSQENDIKTPDITSMLAPTMTGVDDSAFLQNNASDAMVPPVMGNASIDLADLEPYMKFLIDGGSDESIDTLLSSDGSQDVASSMDLWSFDDMPVSAEFY

SEQ ID NO: 133 - protein, 13 aa, Artificial sequence
  motif 1
  VARIANT (1)..(1): /replace = "Ile" /replace = "Val" /replace = "Leu" /replace = "Lys"
  VARIANT (2)..(2): /replace = "Lys" /replace = "Gln" /replace = "Asp" /replace = "Glu" /replace = "Ala"
  VARIANT (3)..(3): /replace = "Leu"
  VARIANT (4)..(4): /replace = "Tyr" /replace = "His"
  VARIANT (6)..(6): /replace = "Ser" /replace = "Arg" /replace = "Lys" /replace = "Thr" /replace = "Asp" /replace = "Gly" /replace = "His" /replace = "Leu" /replace = "Asn"
  VARIANT (7)..(7): /replace = "Thr" /replace = "Arg" /replace = "Asn" /replace = "Gly"
  VARIANT (9)..(9): /replace = "Arg" /replace = "Glu"
  VARIANT (10)..(10): /replace = "Leu" /replace = "Pro" /replace = "Thr"
  VARIANT (13)..(13): /replace = "Val"
RRIRGAKAKVNFP

SEQ ID NO: 134 - protein, 9 aa, Artificial sequence
  motif 2
  VARIANT (5)..(5): /replace = "Ser"
  VARIANT (6)..(6): /replace = "Val" /replace = "Leu"
  VARIANT (7)..(7): /replace = "Leu"
  VARIANT (8)..(8): /replace = "His" /replace = "Ala" /replace = "Tyr" /replace = "Gly" /replace = "Pro" /replace = "Geu"
  VARIANT (9)..(9): /replace = "Gly" /replace = "His" /replace = "Tyr" /replace = "Glu" /replace = "Gln" /replace = "Asn"
MCGGAIISD

SEQ ID NO: 135 - protein, 15 aa, Artificial sequence
  motif 3
  VARIANT (1)..(1): /replace = "Asn" /replace = "Arg" /replace = "Ser" /replace = "His" /replace = "Met" /replace = "Gln' /replace = "Pro" /replace = "Ala" /replace = "Glu"
  VARIANT (2)..(2): /replace = "Lys" /replace = "His" /replace = "Ala" /replace = "Gly" /replace = "Glu" /replace = "Val" /replace = "Pro" /replace = "Met"
  VARIANT (3)..(3): /replace = "Lys" /replace = "Ala" /replace = "Arg" /replace = "Ser" /replace = "Gln" /replace = "Thr" /replace = "Val" /replace = "Gly" /replace = "His" /replace = "Pro"
  VARIANT (4)..(4): /replace = "Lys" /replace = "Gln" /replace = "Ser" /replace = "Gly"
  VARIANT (5)..(5): /replace = "Gly" /replace = "Pro" /replace = "Ser" /replace = "Arg" /replace = "Thr" /replace = "Ala" /replace = "Asn"
  VARIANT (6)..(6): /replace = "Asn" /replace = "Arg" /replace = "Ser" /replace = "Ala" /replace = "Tyr" /replace = "His" /replace = "Gly"
  VARIANT (7)..(7): /replace = "Gln" /replace = "His" /replace = "Val" /replace = "Arg" /replace = "Lys" /replace = "Ala" /replace = "Pro" /replace = "Gly"
  VARIANT (8)..(8): /replace = "Phe"
  VARIANT (9)..(9): /replace = "Trp" /replace = "Lys" /replace = "Lys" /replace = "Leu" /replace = "Met"
  VARIANT (11)..(11): /replace = "Val"
  VARIANT (12)..(12): /replace = "Gln" /replace = "His"
  VARIANT (13)..(13): /replace = "Gln" /replace = "Trp" /replace = "Lys"
  VARIANT (15)..(15): /replace = "Lys" /replace = "Thr"
KRERKTLYRGIRRRP

SEQ ID NO: 136 - protein, 17 aa, Artificial sequence
  motif 4
  VARIANT (3)..(3): /replace = "Thr" /replace = "Glu" /replace = "Val"
  VARIANT (4)..(4): /replace = "Ser"
  VARIANT (9)..(9): /replace = "Asp" /replace = "Glu" /replace = "Ser" /replace = "Asn"
  VARIANT (10)..(10): /replace = "Ser"
  VARIANT (12)..(12): /replace = "Glu"
  VARIANT (13)..(13): /replace = "Tyr" /replace = "Leu"
  VARIANT (14)..(14): /replace = "Ser"
  VARIANT (15)..(15): /replace = "Gln" /replace = "Leu"
  VARIANT (16)..(16): /replace = "Gly" /replace = "Ser"
  VARIANT (17)..(17): /replace = "Glu" /replace = "Asp"
SDQGSNSFGCSDFGWEN

SEQ ID NO: 137 - protein, 7 aa, Artificial sequence
  motif 5
  VARIANT (1)..(1): /replace = "Ile" /replace = "Phe" /replace = "Met"
  VARIANT (3)..(3): /replace = "Thr" /replace = "Asn" /replace = "Met"
  VARIANT (4)..(4): /replace = "Tyr" /replace = "Leu" /replace = "Ile"
  VARIANT (5)..(5): /replace = "Glu" /replace = "Gln" /replace = "Gly"
  VARIANT (6)..(6): /replace = "Asp" /replace = "His" /replace = "Glu"
  VARIANT (7)..(7): /replace = "Tyr" /replace = "Phe" /replace = "Ser" /replace = "Met" /replace = "Leu" /replace = "Val" /replace = "Asp" /replace = "His" /replace = "Asn" /replace = "Glu" /replace = "Gly"
LWSFDNI

SEQ ID NO: 138 - protein, 12 aa, Artificial sequence
  motif 6
  VARIANT (1)..(1): /replace = "Glu" /replace = "Ser"
  VARIANT (2)..(2): /replace = "Ala" /replace = "Trp" /replace = "Asp"
  VARIANT (3)..(3): /replace = "Ala"
  VARIANT (4)..(4): /replace = "Asp" /replace = "Leu"
  VARIANT (5)..(5): /replace = "Ala" /replace = "Gly" /replace = "Glu"
  VARIANT (6)..(6): /replace = "Gly" /replace = "Leu"
  VARIANT (7)..(7): /replace = "Glu" /replace = "Arg" /replace = "Gly" /replace = "Gln" /replace = "Trp"
  VARIANT (8)..(8): /replace = "Gly" /replace = "Val" /replace = "Asp" /replace = "Arg"
  VARIANT (10)..(10): /replace = "Lys" /replace = "Val" /replace = "Tyr" /replace = "Gly" /replace = "Asp" /replace = "Leu" /replace = "Ile"
  VARIANT (11)..(11): /replace = "Arg" /replace = "Asp" /replace = "Ser" /replace = "Asn" /replace = "Ala" /replace = "Glu"
  VARIANT (12)..(12): /replace = "Gly" /replace = "Thr" /replace = "Glu" /replace = "Arg" /replace = "Ala" /replace = "Tyr" /replace = "Leu" /replace = "Leu" /replace = "Phe"
DFEADFNEFEVD

SEQ ID NO: 139 - DNA, 884 bp, Oryza sativa
gactcgtcagcttagagcaccgcaagcgcgcagcagcagcaaagatgtgtggcggcgcgatcatttccgacttcatcccgcagcgggaagcccaccgcgcggccaccggcagcaagcgtgccctctgcgcctccgacttctggccgtcggcgtcgcaggaagccgccgacttcgaccacctcaccgccccctgcaccttcacccccgaccaagcggcagaggagccgaccaagaagcgggagcggaagacgctgtaccgtggcatcaggcggcggccgtgggggaagtgggcggcggagatccgcgacccggcgaagggcgcgcgcgtctggctcggcaccttcgccaccgccgaggcggcggcccgcgcctacgaccgcgccgcccgccgcatccgcggggccaaggccaaggtcaacttccccaacgaggacccgccactcgacgacccggccgccgacggccacagccacggcggcgccgccatcccgtgcagggagttcatggactacgacgccgtcatggcgggcttcttccaccagccctacgtcgtcgccgacggcgtgccggccgtgccggcggaggaggcgcccacggtggcgtacgtgcaccaccacctgccgccgcagccgcagcaggacgcggggctggagctctggagctttgataacatccacacggccgtgccgatgtgagatcgatctgatgatcattcagatcgatgctagctcatgtgtttttaattatatcttcacagcagaaacaaaaaaaagttcaattcagtttattttgttgttatacgttttaaaatgtttcattaggttttcatgttataggagtgatttatcggattgaactctcaagtgaccgacttctgagttctt

SEQ ID NO: 140 - protein, 216 aa, Oryza sativa
MCGGAIISDFIPQREAHRAATGSKRALCASDFWPSASQEAADFDHLTAPCTFTPDQAAEEPTKKRERKTLYRGIRRRPWGKWAAEIRDPAKGARVWLGTFATAEAAARAYDRAARRIRGAKAKVNFPNEDPPLDDPAADGHSHGGAAIPCREFMDYDAVMAGFFHQPYVVADGVPAVPAEEAPTVAYVHHHLPPQPQQDAGLELWSFDNIHTAVPM

SEQ ID NO: 141 - DNA, 1403 bp, Triticum aestivum
ctctccacccgcggccccacgtgctcccagccatgtgcggcggcgccatcctctccgacatcatcccgccgccgcgccgggccaccggcggcaacgtctggcgggcggacaagaagaggagggccaggcccgacgccgccgcggggaggccccgccgcgtgcccgaggaggagttccaggaggaggagggcgacgcggagttcgaggccgacttcgaggggttcgtggaggcggaggaggagtccgacggcgaggccaagcccttccccgtccgcaggaccggcttctccggagatggactgaaggcaactgctgctggtgatgatgactgtgcctcagggtctgctaaaaggaagagaaagagccagttcaggggcatccgccgccgcccttggggtaaatgggctgctgaaataagagatcctcgcaagggtgtccgtgtctggcttggcacttacaactctgctgaggaagctgccagagcctatgatgttgaagcccgcagaattcgtggcaagaaggcaaaggtcaatttcccagaagaagctcccatggatcctcagcaacgctgcgctacctctgtgaaggtgcccgagttcaacaccgaacagaagccagtactcaacaccatgggcaacacagatgtgtattcctgccctgctgttgactacaccttaaatcagcaatttgtgcagcctcagaacatgtcgtttgtgcctacagtgaatgcagttgaggctcctttcatgaatttttcctctgaccaggggagcaactcctttagttgctcagacttcagctgggagaatgatatcaagacccctgacataacttctgtgcttgcatccattcccacctcaactgaggtcaatgaatctgcatttctccagaacaatggcattaattcaacggtacctcctgtgatgggtgatgctaatgttgatcttgccgacttggagccatacatgaagttcctgatggacgatggttcagatgagtcaattgacagcattctaagctgtgatgtaccgcaggacgttgtcggcaacatgggcctttggacctttgatgacatgcccttgtctgctggtttctactgagggaatcgaggtcgctgggtgcctgtatatatagacaaaggaataagtattctggacatcaacaagtgcttgtgtctggtgcctctagaatcgagcagtagcgacgtcagtctatggttatgtctagcttaaatggtcaggagacctaagtcttttgcaatagacctctgtcttgtgcccccagactatattatatctatatatgaaaccagtatgtgatgggaactgcttattttgtattcctgtttctaccttattgtaattgctacaagtggctgtaaaccttttaactttgaaaaaaaa

SEQ ID NO: 142 - protein, 355 aa, Triticum aestivum
MCGGAILSDIIPPPRRATGGNVWRADKKRRARPDAAAGRPRRVPEEEFQEEEGDAEFEADFEGFVEAEEESDGEAKPFPVRRTGFSGDGLKATAAGDDDCASGSAKRKRKSQFRGIRRRPWGKWAAEIRDPRKGVRVWLGTYNSAEEAARAYDVEARRIRGKKAKVNFPEEAPMDPQQRCATSVKVPEFNTEQKPVLNTMGNTDVYSCPAVDYTLNQQFVQPQNMSFVPTVNAVEAPFMNFSSDQGSNSFSCSDFSWENDIKTPDITSVLASIPTSTEVNESAFLQNNGINSTVPPVMGDANVDLADLEPYMKFLMDDGSDESIDSILSCDVPQDVVGNMGLWTFDDMPLSAGFY

SEQ ID NO: 143 - DNA, 908 bp, Oryza sativa
atccaaatccaacgtccgcctaaagaaaaacacgcacacacttcttctgcttccctccccttgtttccgctccacttcccttccaagcaagaaaaccgaggcttcagcttagctaggaccgaccgatccgatgtgcggcggtgcaatcatctacgactacatcccggcgcgccgccggttgtgcgcctccgacttctggcccgacgccgacgactccgacccccacacccccgctcccgagaaaccgccgcgcgcgaagagggagcggaagaaccagtaccgcgggatcaggcagcggccgtgggggaagtgggcggcggagatccgcgacccggtgaagggggtgcgcgtctggctcggcacctacccgaccgccgaggccgccgcgcgggcctacgaccgcgccgcgcgccgcatcaggggcgccaaggcgaaggtcaacttccccaacgacttcggcgccgcccccgcgccggccgcggcggcggcgaaggccgtccctcgcgtcgcgcccacgccggccgtgctcccgccgcccaagatggaggcggtgtccgagggcgccggcgcctgctcctccgacgaggtcaaggagctgtccgaggagctgctcgcgtacgagaactacatgagcttcctcggcatcccctacatggagggcggcgccgcctccgccgccggcgccgaggaagccgcggcgcccgccgggctctggaccttcgaagactacgagctgccgtcgctagcgctctagtaaaaatgtcacaataaaaatgacatgtatgtgaaaaaatttttccctacccgtagtaagtaaccagtgtctttttttaccgtactctatgcgttatttttgttgaaattaatccattgttgaagttgtaactgtgcatggtcggcgccagtct

SEQ ID NO: 144 - protein, 207 aa, Oryza sativa
MCGGAIIYDYIPARRRLCASDFWPDADDSDPHTPAPEKPPRAKRERKNQYRGIRQRPWGKWAAEIRDPVKGVRVWLGTYPTAEAAARAYDRAARRIRGAKAKVNFPNDFGAAPAPAAAAAKAVPRVAPTPAVLPPPKMEAVSEGAGACSSDEVKELSEELLAYENYMSFLGIPYMEGGAASAAGAEEAAAPAGLWTFEDYELPSLAL

SEQ ID NO: 145 - DNA, 1574 bp, Oryza sativa
aaaggcattcgcaacacacacttgaagaaaaaaaacacgacgaacacgttaaaaaaaggtcgaagagaagtgggagacccaaaccgcgaacaatgtgtggaggcgccatcctcgccgagttcatcccggcgccgtcgcgcgccgcggcggcgaccaagcgggtgaccgccagccacctgtggccggccggctccaagaacgccgcccgcggcaagagcaagagcaagaggcagcagaggagcttcgccgacgtcgacgacttcgaggccgccttcgagcagttcgacgatgactccgacttcgacgacgcggaggaagaagacgaaggacacttcgtgttcgcgtccaaatctcgtgtcgtcgccgggcacgacgggcgcgcggcggcgagggcggcgagcaagaagaagcgggggcggcacttccgaggcatccggcagcggccatgggggaagtgggcggcggagatccgcgacccgcacaagggcacgcgcgtctggctcggcacgttcaacaccccggaggaggccgcacgcgcctacgacgtcgaggcgcgccgcctccgcggcagcaaggccaaggtcaacttccccgccacgcccgccgccgcgcgcccacgccgcggcaacacgagagccaccgccgtgccaccgccggcgacagcacccgccgccgccccgccgcgcggactgaagcgagaattctcgccgcctgctgagaccgcgctacctttcttcaccaacggcttcgtcgacctgacgaccgccgcggcgccgccaccggccatgatgatgacgagctccttcaccgacagcgtcgccacgtcggagtccggcgggagccccgccaagaaggcgaggtccgacgacgtcgactcgtccgagggcagcgtcggcggcggcagcgacacgctgggtttcaccgacgagctggagttcgacccgttcatgctgttccagctcccctactccgacggctacgagtccatcgacagcctcttcgccgccggcgacgccaacagcgcgaacaccgacatgaacgccggcgtcaacctgtggagcttcgacgacttcccaatcgacggcgcccttttctgatgtactcctccattgatgcagtttgtgcactcaattgttaatcacgtcgtcgttgatgaatgtttaaccggaggatgatggggtgcagctgatatcatggcttgcttgattaccgaattatattgcggtgtttgtgtttgtcaattagattctgaatctgtactactgccgatcttatgatcaaaactatatattaagtttatgtactcttaatttgtgggctacttttacggggtcttcgtactgctggtcaaatagtcctatgaaatcgatcatgtcggcaatatcgtcgtcaattatcgtggtcgtggttgttaatgatgtcaaataagtctatgaaaacctggtcctcttggtgtttatgtaccactgatcgatccatcatttgatctctgtcatgttgagatggatcgtgtaagaatatcataatttgctggattcagtccagtcgtaatgtattttggtttgtacaactgc

SEQ ID NO: 146 - protein, 334 aa, Oryza sativa
MCGGAILAEFIPAPSRAAAATKRVTASHLWPAGSKNAARGKSKSKRQQRSFADVDDFEAAFEQFDDDSDFDDAEEEDEGHFVFASKSRVVAGHDGRAAARAASKKKRGRHFRGIRQRPWGKWAAEIRDPHKGTRVWLGTFNTPEEAARAYDVEARRLRGSKAKVNFPATPAAARPRRGNTRATAVPPPATAPAAAPPRGLKREFSPPAETALPFFTNGFVDLTTAAAPPPAMMMTSSFTDSVATSESGGSPAKKARSDDVDSSEGSVGGGSDTLGFTDELEFDPFMLFQLPYSDGYESIDSLFAAGDANSANTDMNAGVNLWSFDDFPIDGALF

SEQ ID NO: 147 - DNA, 1451 bp, Triticum aestivum
ctttcctttcgcttagctctccacccgcggccccacgtgctcccagccatgtgcggcggcgccatcctctccgacatcatcccgccgccgcgccggcccgccggcggccgcctctggcaggcggacaggaagaagaggagggccgggccccgccgcgtgcccgaggaggagcccgaggaggaggcggaggagggcgacgaggacttcgaggccgacttcgaggggttcgtggacgaggagtccgacggcgaggtcaagcccttccccgcccgcaggagcggcttctccggagatggattgaaggcaactgctgctggtgaatatgactgtgcctcagggtctgctaaaaggaagagaaagaaccagttcaggggcatccgccgccgcccttggggtaaatgggctgctgaaataagagatcctcgcaagggtgtccgtgtctggcttggtacttacaactccgctgaggaagctgccagagcctatgatgttgaagcccgcagaattcgtggcaagaaggcaaaggtcaatttcccagaagaagctcctatggctcctcagcaacgctgcgctactgctgtgaaggtgcccgagttcaacaccgaacagaagccggtactcaacaccatgggcaacgcagatgtgtattcctgctctgctgttgactacaccttaaatcagcaatttgtgcagcctcagaacatgtcgtttgtgcctacagtgaatgcagttgaggcccctttcatgaatttttcctctgaccagggtagcaactcctttagttgctcagacttcagctgggagaatgatatcaagacccctgacataacttctgtgcttgcatccattcccacctcaacagaggtcaatgaatctgcatttctccagaacaatggcatcaattcaacggtacctcctgtgatgggtgatgctaatgttgatcttgccgacttggagccatacatgaagttcctgatggacgatggttcagatgagtcaattgacagcattctaagctgtgatgtaccccaggatgtggtcggcaacatgggcctttggacctttgatgacatgcccttgtctgctggtttctactgagggaatcgaggtcgctgggtgcctgtatatatagacaaagggaataagtattcaggacatcaacaagtgcttgtgtctggtgcctctagaattgagcagtagcgatgtcagtctatggttatgtctagcttaaatggtcaggtgactgaggtcttttgcaatagacctctgtcttgtgcccccagactatacttatatctatatatgagaccagtatgtgatggggaactgcttattttgtattcatgtttctaccttattgtaactgctacaagaggctgtaaaccttttaaatttgaagccagtgtttgttctgttgtgcttaaaaaaaaaaaaaaaaaaaaagtatctgc

SEQ ID NO: 148 - protein, 349 aa, Triticum aestivum
MCGGAILSDIIPPPRRPAGGRLWQADRKKRRAGPRRVPEEEPEEEAEEGDEDFEADFEGFVDEESDGEVKPFPARRSGFSGDGLKATAAGEYDCASGSAKRKRKNQFRGIRRRPWGKWAAEIRDPRKGVRVWLGTYNSAEEAARAYDVEARRIRGKKAKVNFPEEAPMAPQQRCATAVKVPEFNTEQKPVLNTMGNADVYSCSAVDYTLNQQFVQPQNMSFVPTVNAVEAPFMNFSSDQGSNSFSCSDFSWENDIKTPDITSVLASIPTSTEVNESAFLQNNGINSTVPPVMGDANVDLADLEPYMKFLMDDGSDESIDSILSCDVPQDVVGNMGLWTFDDMPLSAGFY

SEQ ID NO: 149 - DNA, 602 bp, Arabidopsis thaliana
gttctagtttggagttggaagcgtaaaaaacaaaaaacaaaaatgtgtgggggagctatcatttctgatttcatctggtcgaaatctgagtcagaaccgagtcaactcggctctgttagcagcaggaagaagcgtaaacccgtctcagtgagtgaagaaagagatgggaaacgagagaggaagaatctgtacagagggataaggcagaggccatggggcaaatgggcagcggagattcgtgacccgagcaaaggtgtacgtgtctggcttggcacattcaaaaccgccgacgaagctgctcgagcctacgacgttgctgccatcaaaatccgtggccggaaagccaaactgaatttcccaaacactcaagtagaagaagaagccgatactaaaccaggggggaatcaaaatgagctgatttcggaaaaccaagtagagagcttatcggaggacctgatggcattggaggattacatgagattctatcagattccggttgccgacgaccaatcggcgaccgatattggaaatttatggagctatcaagactccaattaaatctcttatttcccggccggtttgctcactcattaatatgctgc

SEQ ID NO: 150 - protein, 171 aa, Arabidopsis thaliana
MCGGAIISDFIWSKSESEPSQLGSVSSRKKRKPVSVSEERDGKRERKNLYRGIRQRPWGKWAAEIRDPSKGVRVWLGTFKTADEAARAYDVAAIKIRGRKAKLNFPNTQVEEEADTKPGGNQNELISENQVESLSEDLMALEDYMRFYQIPVADDQSATDIGNLWSYQDSN

SEQ ID NO: 151 - DNA, 1686 bp, Oryza sativa
tctctccaatattttgtcgaaccgattgagggaaaaaaaaagagaaaaagaaaagaaaaaaaagaagaagaagagagaactcgaactctcgcctaccatttcgcccccctccgcaagcaatccaccactgcatcggcggcgagggctcaccggcggcgagccatgtgcggcggcgccatcatccaccacctgaaggggcacccggaggggtcgcgccgggcgacggaggggctcctgtggcccgagaagaagaagcccaggtggggcggcggcgggaggcgccacttcggggggttcgtggaggaggacgacgaggacttcgaggccgacttcgaggagttcgaggtggactccggggactcggatttggagctcggggaggaggacgacgatgacgtcgtcgagatcaagccggccgccttcaagagggccctctccagagataacttgagcaccattaccactgccggatttgatggtcctgctgcaaagtctgccaaaagaaagagaaagaaccaattcaggggcatccgccagcgcccttggggtaagtgggctgctgaaatcagagatcctcgcaagggtgttcgtgtctggcttggcactttcaacagtgctgaagaagctgcaagagcttatgatgctgaagcacgcaggattcgtggcaagaaggccaaggtgaattttccagaggctccaacaactgctcagaagcgtcgtgctggctccaccactgctaaagcacccaagtcaagtgtggaacagaagcctactgtcaaaccagcattcaacaatcttgccaatgcaaatgcgtttgtctacccatctgctaacttcacttcaaacaagccgtttgttcagcctgataacatgccatttgttcctgcaatgaactctgctgctcctattgaggaccctatcatcaactctgaccagggaagcaactcatttggctgctctgactttggctgggagaatgataccaagacaccagatattacatcaattgctcccatttcaaccatagctgaagtcgatgaatctgcattcattaagagcagtaccaacccaatggtccctcctgttatggagaacagtgctgttgatctgcctgatttagaaccctacatgaggttccttctggatgatggtgctggtgactcaattgatagccttctcaacctggatggatcacaggatgttgtcagcaacatggacctctggagctttgatgacatgcccgttagcgatttctattgaggaattcgaagtcttctagtcggagcatgtacacagggaaaaaaaaggaataaatactattggagattgggaggcacctgcatggcaccttgggggtagcatatcgttatgtttagcttagatgcaaaaggctgcatcctgaaactctttggtgattggacctgttccctatccgctgtctatgtatggcagccatctatgagactcaagaactgcttttttttttccgttctagttttctgtcgttgctacctgtatatggctatgaacatcgtgaatccatggccattatgttttaatctatgttgttgactgctctttctttcggtctttgctgtgctgcgctatgttggtgataactagctaccatattgattttctgtacataattcatttgttgaatccgaaattaaatagtgcattgac

SEQ ID NO: 152 - protein, 365 aa, Oryza sativa
MCGGAIIHHLKGHPEGSRRATEGLLWPEKKKPRWGGGGRRHFGGFVEEDDEDFEADFEEFEVDSGDSDLELGEEDDDDVVEIKPAAFKRALSRDNLSTITTAGFDGPAAKSAKRKRKNQFRGIRQRPWGKWAAEIRDPRKGVRVWLGTFNSAEEAARAYDAEARRIRGKKAKVNFPEAPTTAQKRRAGSTTAKAPKSSVEQKPTVKPAFNNLANANAFVYPSANFTSNKPFVQPDNMPFVPAMNSAAPIEDPIINSDQGSNSFGCSDFGWENDTKTPDITSIAPISTIAEVDESAFIKSSTNPMVPPVMENSAVDLPDLEPYMRFLLDDGAGDSIDSLLNLDGSQDVVSNMDLWSFDDMPVSDFY

SEQ ID NO: 153 - DNA, 1613 bp, Oryza sativa
ctgtagcttattagcggccatgtgcggcggagcaatcatctccgggttcatcccgccgtcggccgctgcggcggcggcggcggcggcggcggcggccaagaagcagcagggcaggagggtcacggccgacgtgctgtggccggggatgctgcggaaggggaaggcgggggcggcggaggaggactttgaggccgacttccgcgagttcgagcgtggcatgagcgacgacgaggcggaggggggcggcggcgaggaggaggaggaggaggaggacgacgtggtcgtggaggtccccccgccggcgacggcgaggttcgtcgtccgtgccgcggccaaggcggcgcccccaactgcagatgggatgttgactacaaagcttgtccaacatgatggacctactgctagatcggcaaagcgcaagaggaagaatcagtacagggggatccgccagcgtccctggggcaaatgggcagctgaaatccgagaccccagcaagggtgtccgtgtttggcttggaacatataacactgctgaggaggcagctagggcatatgacgctgaagcccgcaagatccgtggcaagaaagccaaggtcaactttcctgatgaaccagctgttgctcagaagctctccctgaagcaaaacgctgccaagcaagagaaactagctccacctctgaagtcctgtggcgatgatgctttctttcagctaaacagttcagacaatgatttgtttgcaatgcttgcaaaggtgcctgcaaagccggcagagcctgttgatctcatgcctccagtcaaacctcttgcttccactgagacattcgagatgaacatgctctctgatacgagcagcaactcatttggctcttcagactttggttgggaggatgacaccctgaccccagactacacttcagtctttgttcctaatgctgccatgccagcatatggtgaacctgcttacctgacaggtggagcgccaaagagaatgaggaacaactatggtatcgccgtgccccagggaaatggcatgcctaatctcgcacaaaacatgcccaccttcgatcccgagatgaagtatttgccattaccttatgttgagagcagctcagatgaatcaatggacaaccttctgcaaaatgatgctacacaagacggggcaagcaacgagggcatctggagccttgatgagctgctcatggcagctggtgcctactgaggagacgaaatgttctggtcagtgtggtctgtcactagcaaaccatgtaaggcactccacactacctactattttgatttcttgtagatacattttcatgtttgaatgtgtatggccaagatgaagagctggtgatgtctgctatgttttgtagagggatgctaccaaagtaatgctagaatattacaagctgctatcagctgtactctctatgacaatgtttatactatgtttgctgtatggtgtggtctatgatttgaagtatgtcggagactaattcaaataatgcccttgggccatggtgctgtgccttggtaaatggtgctttatttaagggttatattaggttggtgcctcagtaattgccgttttctaccaaaaaaaaaaaaaaaaa

SEQ ID NO: 154 - protein, 396 aa, Oryza sativa
MCGGAIISGFIPPSAAAAAAAAVAKKQQGRRVTADVLWPGMLRKGKAAAAEEDFEADFREFERGMSDDEAEGGGGEEEEDDDDVVVVVPPPAAARFVVRAAAKAAPPTADGMLTTKLVQHDGPTARSAKHKRKNQYRGIRQRPWGKWAAEIRDPSKGVRVWLGTYNTAEEAARAYDAEARKIRGKKAKVNFPDEPAVAQKLSLKQNAAKQEKLAPPLKTCGDDAFFQLNSSDNDLFAMLAKVPAKPAEPVDLMPPVKPLASTETFEMNMLSDTSSNSFGSSDFGWEDDTLTPDYTSVFVPNAAMPAYGEPAYLTGGAPKRMRNNYGIAVPQGNGMPNLAQNMPTFDPEMKYLPLPYVESSSDESMDNLLQNDATQDGASNEGIWSLDELLMAAGAY

SEQ ID NO: 155 - DNA, 1068 bp, Triticum aestivum
atgtgcggcggcgccatcctctccgacatcatcccgccgccgcgccgggccaccggcggcaacgtctggcgggcggacaagaagaggagggccaggcccgacgccgccgcggggaggccccgccgcgtgcccgaggaggagttccaggaggaggagagcgacgcggagttcgaggccgacttcgaggggttcgtggaggcggaggaggagtccgacggcgaggccaagcccttccccgtccgcaggagcggcttctccggagatggattgaaggcaactgctgctggtgatgatgactgtgcttcagggtctgctaaaaggaagagaaagaaccagttcaggggcatccgccgccgcccttggggtaaatgggctgctgaaataagagatcctcgcaagggtgtccgtgcctggcttggcacttacaactctgctgaggaagctgtcagagcctatgatgttgaagcccgcagaattcgtggcaagaaggcaaagtcaatttcccagaagaagctcccatggctcctcagcaaacgctgcgctacctctgtgaaggtgcccgagttcaacaccgaacagaagccagtactcaacaccatgggcaacgcagatgtgtattcctgccctgctgttgactacaccttaaatcagcaatttgtgcagcctcagaacatgtcgtttgtgcctacagtgaatgcagttgaggctcctttcatgaatttttcctctgaccaggggagcaactcctttagttgctcagacttcagctgggagaatgatatcaagacccctgacataacttctgtgcttgcatccattcccacctcaactgaggtcaatgaatctgcatttctccagaacaatggcattaattcaacggtacctcctgtgatgggtgatgctaatgttgatcttgcctacttggagccgtacatgaagttcctgatggacgatggttcagatgagtcaattgacagcattctaagctgtgatgtaccgcaggacgttgtcggcaacatgggcctttggacctttgatgacatgcccttgtctgctggtttctactga

SEQ ID NO: 156 - protein, 355 aa, Triticum aestivum
MCGGAILSDIIPPPRRATGGNVWRADKKRRARPDAAAGRPRRVPEEEFQEEESDAEFEADFEGFVEAEEESDGEAKPFPVRRSGFSGDGLKATAAGDDDCASGSAKRKRKNQFRGIRRRPWGKWAAEIRDPRKGVRAWLGTYNSAEEAVRAYDVEARRIRGKKAKSISQKKLPWLLSKRCATSVKVPEFNTEQKPVLNTMGNADVYSCPAVDYTLNQQFVQPQNMSFVPTVNAVEAPFMNFSSDQGSNSFSCSDFSWENDIKTPDITSVLASIPTSTEVNESAFLQNNGINSTVPPVMGDANVDLAYLEPYMKFLMDDGSDESIDSILSCDVPQDVVGNMGLWTFDDMPLSAGFY

SEQ ID NO: 157 - DNA, 999 bp, Triticum aestivum
atgtgcggcgggcgccatcctctccgacatcatcccgccgcggggaggccctgccgtgcgcctgaggaggagttccaggaggaggagggcgacgcggagttcgaggccgacttcgaggggttcgtggaggcggaggaggagtccgacggcgaggccaagcccttccccgtccgcaggagcggcttctccggagatggattgaaggcaactgctgctggtgatgatgactgtgcctcagggtctgctaaaaggaagagaaagaaccagttcaggggcgtccgccgccgcccttggggtaaatgggctgctgaaataagagatcctcgcaagggtgtccgtgtctggcttggtacttacaactccgctgaggaagctgccagagcctatggtgttgaggcccgcagaattcgtggcaagaaggcaaaggtcaatttcccagaagaagctcctatggctcctcagcaacgctgcgctactgctgtgaaggtgcccgagttcaacaccgaacagaagccggtactcaacaccatgggcaacgcagatgtgtattcctgctctgctgttgactacaccttaaatcagcaatttgtgcagcctcagaacatgtcgtttgtgcctacagtgaatgcagttgaggcccctttcatgaatttttcctctgaccagggtagcaactcctttagttgctcagacctcagctgggagaatgatatcaagacccctgacataacttctgtgcttgcatccattcccacctcaacagaggtcaatgaatctgcatttctccagaacaatggcatcaattcaacggtacctcctgtgatgggtgatgctaatgttgatcttgccgacttggagccatacatgaagttcctgatggacgatggttcagatgagtcaattgacagcattctaagctgtgatgtaccccaggatgtggtcggcaacatgggcctttggacctttgatgacatgcccttgtctgctggtttctactga

SEQ ID NO: 158 - protein, 332 aa, Triticum aestivum
MCGGRHPLRHHPAAGRPCRAPEEEFQEEEGDAEFEADFEGFVEAEEESDGEAKPFPVRRSGFSGDGLKATAAGDDDCASGSAKRKRKNQFRGVRRRPWGKWAAEIRDPRKGVRVWLGTYNSAEEAARAYGVEARRIRGKKAKVNFPEEAPMAPQQRCATAVKVPEFNTEQKPVLNTMGNADVYSCSAVDYTLNQQFVQPQNMSFVPTVNAVEAPFMNFSSDQGSNSFSCSDLSWENDIKTPDITSVLASIPTSTEVNESAFLQNNGINSTVPPVMGDANVDLADLEPYMKFLMDDGSDESIDSILSCDVPQDVVGNMGLWTFDDMPLSAGFY

SEQ ID NO: 159 - DNA, 1452 bp, Arabidopsis thaliana
aaaacaacaaagcaaagcgttgaagagagaagaagaagcaaagatataacccccaaaagtatcaattagtttccattttcgccgctaagattctgttttcgaacatttacaccctcaagaatcgccgccatgtgtggaggagctataatatccgatttcattccaccgccgaggtctcgccgtgttactagcgagtttatttggccggatctgaagaagaatttgaaaggatcgaagaaaagctcgaagaatcgttcgaatttcttcgattttgacgctgagttcgaagctgatttccaaggtttcaaagatgattcgtctatcgattgcgatgatgatttcgacgtcggtgatgttttcgccgatgtgaaaccattcgttttcacttcgactccaaaacccgccgtctccgccgctgcggaaggttcagtttttggtaagaaagttactggcttggatggggacgctgagaaatctgcaaataggaagaggaagaatcagtaccgagggattaggcaacgtccttggggaaaatgggctgctgagatacgtgatccaagggaaggtgctagaatctggcttggaacgttcaagacagctgaggaagctgctagagcttacgatgctgcagcgcggagaatccgtggatctaaagctaaggtgaatttccctgaagaaaacatgaaggctaattctcagaaacgctctgtgaaggctaatcttcagaaaccagtggctaaacctaaccctaacccaagtccagctttggttcagaactcgaacatctcctttgaaaatatgtgtttcatggaggagaaacaccaagtgagcaacaacaacaacaaccagtttgggatgacaaactccgttgatgctggatgtaatgggtatcagtatttcagctctgaccagggtagtaattctttcgattgttcggagtttggttggagcgatcaagctccgataactcccgacatctcttctgcggttatcaacaacaacaactcagctctgttctttgaggaagccaatccagctaagaagctcaagtctatggatttcgagacaccttacaacaacactgaatgggacgcttcactggatttcctcaacgaagatgctgtaacgactcaggacaatggtgcaaaccctatggacctatggagtattgatgaaattcattccatgattggaggagtcttctgaagagatccagtttcatgagttcctgtttgcattgcgagaagccatgagcctctatcttgagggtagttgtgatgaagttaagtagaggcttatttttaggggttgtggtagtttttgttttagtgaatcttttgaattcgtttgtgttttgtttttgttactttatgccccaaaactcctttaacatttgtcataatgtgtttgaacctctcatctgtttaatcaaataaatcttctttgtatgct

SEQ ID NO: 160 - protein, 358 aa, Arabidopsis thaliana
MCGGAIISDFIPPPRSRRVTSEFIWPDLKKNLKGSKKSSKNRSNFFDFDAEFEADFQGFKDDSSIDCDDDFDVGDVFADVKPFVFTSTPKPAVSAAAEGSVFGKKVTGLDGDAEKSANRKRKNQYRGIRQRPWGKWAAEIRDPREGARIWLGTFKTAEEAARAYDAAARRIRGSKAKVNFPEENMKANSQKRSVKANLQKPVAKPNPNPSPALVQNSNISFENMCFMEEKHQVSNNNNNQFGMTNSVDAGCNGYQYFSSDQGSNSFDCSEFGWSDQAPITPDISSAVINNNNSALFFEEANPAKKLKSMDFETPYNNTEWDASLDFLNEDAVTTQDNGANPMDLWSIDEIHSMIGGVF

SEQ ID NO: 161 - DNA, 1568 bp, Arabidopsis thaliana
aaaaacaacaaagcaaagcgttgaagagagaagaagaagcaaagatataacccccaaaagtatcaattagtttccattttcgccgctaagattctgttttcgaacatttacaccctcaagaatcgccgccatgtgtggaggagctataatatccgatttcattccaccgccgaggtctcgccgtgttactagcgagtttatttggccggatctgaagaagaatttgaaaggatcgaagaaaagctcgaagaatcgttcgaatttcttcgattttgacgctgagttcgaagctgatttccaaggtttcaaagatgattcgtctatcgattgcgatgatgatttcgacgtcggtgatgttttcgccgatgtgaaaccattcgttttcacttcgactccaaaacccgccgtctccgccgctgcggaaggttcagtttttggtaagaaagttactggcttggatggggaagctgagaaatctgcaaataggaagaggaagaatcagtaccgagggattaggcaacgtccttggggaaaatgggctgctgagatacgtgatccaagggaaggtgctagaatctggcttggaacgttcaagacagctgaggaagctgctagagcttacgatgctgcagcgcggagaatccgtggatctaaagctaaggtgaatttccctgaagaaaacctgaaggctaattctcagaaacgctctgtgaaggctaatcttcagaaaccagtggctaaacctaaccctaacccaagtccagctttggttcagaactcgaacatctcctttgaaaatatgtgtttcatggaggagaaacaccaagtgagcaacaacaacaacaaccagtttgggatgacaaactccgttgatgctggatgtaatgggtatcagtatttcagctctgaccagggtagtaattctttcgattgttcggagtttggttggagcgatcaagctccgataactcccgacatctcttctgcggttatcaacaacaacaactcagctctgttctttgaggaagccaatccagctaagaagctcaagtctatggatttcgagacaccttacaacaacactgaatgggacgcttcactggatttcctcaacgaagatgctgtaacgactcaggacaatggtgcaaaccctatggacctatggagtattgatgaaattcattccatgattggaggagtcttctgaagagatccagtttcatgtaaataaggctgcatgtttgtgagtttcccgcatcgttcgtttatcaacctccaaaactttctaatgtctgttacttgcatcttcttctgctgtctctgtctgtctctctcaggagttcctgtttgcattgcgagaagccatgagcctctatcttgagggtagttgtgatgaagttaagtagaggcttatttttaggggttgtggtagtttttgttttagtgaatcttttgaattcgtttgtgttttgtttttgttactttatgccccaaaactcctttaacatttgtcataatgtgtttgaacctcctcatctgtttaatcaaataaatcttctttgtatgct

SEQ ID NO: 162 - protein, 358 aa, Arabidopsis thaliana
MCGGAIISDFIPPPRSRRVTSEFIWPDLKKNLKGSKKSSKNRSNFFDFDAEFEADFQGFKDDSSIDCDDDFDVGDVFADVKPFVFTSTPKPAVSAAAEGSVFGKKVTGLDGEAEKSANRKRKNQYRGIRQRPWGKWAAEIRDPREGARIWLGTFKTAEEAARAYDAAARRIRGSKAKVNFPEENLKANSQKRSVKANLQKPVAKPNPNPSPALVQNSNISFENMCFMEEKHQVSNNNNNQFGMTNSVDAGCNGYQYFSSDQGSNSFDCSEFGWSDQAPITPDISSAVINNNNSALFFEEANPAKKLKSMDFETPYNNTEWDASLDFLNEDAVTTQDNGANPMDLWSIDEIHSMIGGVF

SEQ ID NO: 163 - DNA, 1644 bp, Arabidopsis thaliana
ggagagtaacatcgagacaaagaagaaaaactaaaaaagagaaccccaaagaatcgaatatttattatttcgccccgaagattctatttctgatcatttacacccctaaaaagagtagagctttcgtgaagccaccatgtgtggaggagctataatctccgatttcatacctccgccgaggtccctccgcgtcactaacgagtttatctggccggatctgaaaaacaaagtgaaagcttcaaagaagagatcgaataagcgatccgatttcttcgatcttgacgatgatttcgaagctgatttccaagggtttaaggatgactcggcttttgactgcgaagacgatgatgatgtcttcgtcaatgttaagcctttcgtcttcaccgcaactactaagcccgtagcttccgctttcgtctccactggtatatatttggtaggttcagcatatgccaagaaaactgtagagtccgctgagcaagctgagaaatcttctaagaggaagaggaagaatcaataccgagggattaggcagcgtccttggggaaaatgggctgcggagatccgtgatccgagaaaaggctcccgagaatggcttggaacattcgacactgctgaggaagcagcaagagcttatgatgctgcagcacgcagaatccgtggcacgaaagctaaggtgaattttcccgaggagaagaaccctagcgtcgtatcccagaaacgtcctagtgctaagactaataatcttcagaaatcagtggctaaaccaaacaaaagcgtaactttggttcagcagccaacacatctgagtcagcagtactgcaacaactcctttgacaactcttttggtgatatgagtttcatggaagagaagcctcagatgtacaacaatcagtttgggttaacaaactcgttcgatgctggaggtaacaatggataccagtatttcagttccgatcagggcagtaactccttcgactgttctgagttcgggtggagtgatcacggccctaaaacacccgagatctcttcaatgcttgtcaataacaacgaagcatcatttgttgaagaaaccaatgcagccaagaagctcaaaccaaactctgatgagtcagacgatctgatggcataccttgacaacgccttgtgggacaccccactagaagtggaagccatgcttggcgcagatgctggtgctgtgactcaggaagaggaaaacccagtggagctatggagcttagatgagatcaatttcatgctggaaggagacttttgaagtgatcgatggttccttagtttgtaaataaagctgtgttggattttgctgttgggggatggtacaagtcacacctcaagctctatgcattggtatctcatgagcctctcttccatagagagtttctcttttaattttgtcgaaataaaaaaggtgtgatgaagtaaatagaggtataataatatctatctattaagtcttgttttgttctttcatttttgtatttcttttctatttaaaagacagtttattagtcttctgagctctctttttgatctttgttatagcgtatcatcaccctcgaaagtgtaatgttttgtacccccaaacttgtttagcattataataaagtctctttggaacttctc

SEQ ID NO: 164 - protein, 379 aa, Arabidopsis thaliana
MCGGAIISDFIPPPRSLRVTNEFIWPDLKNKVKASKKRSNKRSDFFDLDDDFEADFQGFKDDSAFDCEDDDDVFVNVKPFVFTATTKPVASAFVSTGIYLVGSAYAKKTVESAEQAEKSSKRKRKNQYRGIRQRPWGKWAAEIRDPRKGSREWLGTFDTAEEAARAYDAAARRIRGTKAKVNFPEEKNPSVVSQKRPSAKTNNLQKSVAKPNKSVTLVQQPTHLSQQYCNNSFDNSFGDMSFMEEKPQMYNNQFGLTNSFDAGGNNGYQYFSSDQGSNSFDCSEFGWSDHGPKTPEISSMLVNNNEASFVEETNAAKKLKPNSDESDDLMAYLDNALWDTPLEVEAMLGADAGAVTQEEENPVELWSLDEINFMLEGDF

SEQ ID NO: 165 - DNA, 1632 bp, Arabidopsis thaliana
ggagagtaacatcgagacaaagaagaaaaactaaaaaagagaaccccaaagaatcgaatatttattatttcgccccgaagattctatttctgatcatttacacccctaaaaagagtagagctttcgtgaagccaccatgtgtggaggagctataatctccgatttcatacctccgccgaggtccctccgcgtcactaacgagtttatctggccggatctgaaaaacaaagtgaaagcttcaaagaagagatcgaataagcgatccgatttcttcgatcttgacgatgatttcgaagctgatttccaagggtttaaggatgactcggcttttgactgcgaagacgatgatgatgtcttcgtcaatgttaagcctttcgtcttcaccgcaactactaagcccgtagcttccgctttcgtctccactgtaggttcagcatatgccaagaaaactgtagagtccgctgagcaagctgagaaatcttctaagaggaagaggaagaatcaataccgagggattaggcagcgtccttggggaaaatgggctgcggagatccgtgatccgagaaaaggctcccgagaatggcttggaacattcgacactgctgaggaagcagcaagagcttatgatgctgcagcacgcagaatccgtggcacgaaagctaaggtgaattttcccgaggagaagaaccctagcgtcgtatcccagaaacgtcctagtgctaagactaataatcttcagaaatcagtggctaaaccaaacaaaagcgtaactttggttcagcagccaacacatctgagtcagcagtactgcaacaactcctttgacaactcttttggtgatatgagtttcatggaagagaagcctcagatgtacaacaatcagtttgggttaacaaactcgttcgatgctggaggtaacaatggataccagtatttcagttccgatcagggcagtaactccttcgactgttctgagttcgggtggagtgatcacggccctaaaacacccgagatctcttcaatgcttgtcaataacaacgaagcatcatttgttgaagaaaccaatgcagccaagaagctcaaaccaaactctgatgagtcagacgatctgatggcataccttgacaacgccttgtgggacaccccactagaagtggaagccatgcttggcgcagatgctggtgctgtgactcaggaagaggaaaacccagtggagctatggagcttagatgagatcaatttcatgctggaaggagacttttgaagtgatcgatggttccttagtttgtaaataaagctgtgttggattttgctgttgggggatggtacaagtcacacctcaagctctatgcattggtatctcatgagcctctcttccatagagagtttctcttttaattttgtcgaaataaaaaaggtgtgatgaagtaaatagaggtataataatatctatctattaagtcttgttttgttctttcatttttgtatttcttttctatttaaaagacagtttattagtcttctgagctctctttttgatctttgttatagcgtatcatcaccctcgaaagtgtaatgttttgtacccccaaacttgtttagcattataataaagtctctttggaacttctc

SEQ ID NO: 166 - protein, 375 aa, Arabidopsis thaliana
MCGGAIISDFIPPPRSLRVTNEFIWPDLKNKVKASKKRSNKRSDFFDLDDDFEADFQGFKDDSAFDCEDDDDVFVNVKPFVFTATTKPVASAFVSTVGSAYAKKTVESAEQAEKSSKRKRKNQYRGIRQRPWGKWAAEIRDPRKGSREWLGTFDTAEEAARAYDAAARRIRGTKAKVNFPEEKNPSVVSQKRPSAKTNNLQKSVAKPNKSVTLVQQPTHLSQQYCNNSFDNSFGDMSFMEEKPQMYNNQFGLTNSFDAGGNNGYQYFSSDQGSNSFDCSEFGWSDHGPKTPEISSMLVNNNEASFVEETNAAKKLKPNSDESDDLMAYLDNALWDTPLEVEAMLGADAGAVTQEEENPVELWSLDEINFMLEGDF

SEQ ID NO: 167 - DNA, 1629 bp, Arabidopsis thaliana
ggagagtaacatcgagacaaagaagaaaaactaaaaaagagaaccccaaagaatcgaatatttattatttcgccccgaagattctatttctgatcatttacacccctaaaaagagtagagctttcgtgaagccaccatgtgtggaggagctataatctccgatttcatacctccgccgaggtccctccgcgtcactaacgagtttatctggccggatctgaaaaacaaagtgaaagcttcaaagaagagatcgaataagcgatccgatttcttcgatcttgacgatgatttcgaagctgatttccaagggtttaaggatgactcggcttttgactgcgaagacgatgatgatgtcttcgtcaatgttaagcctttcgtcttcaccgcaactactaagcccgtagcttccgctttcgtctccactggttcagcatatgccaagaaaactgtagagtccgctgagcaagctgagaaatcttctaagaggaagaggaagaatcaataccgagggattaggcagcgtccttggggaaaatgggctgcggagatccgtgatccgagaaaaggctcccgagaatggcttggaacattcgacactgctgaggaagcagcaagagcttatgatgctgcagcacgcagaatccgtggcacgaaagctaaggtgaattttcccgaggagaagaaccctagcgtcgtatcccagaaacgtcctagtgctaagactaataatcttcagaaatcagtggctaaaccaaacaaaagcgtaactttggttcagcagccaacacatctgagtcagcagtactgcaacaactcctttgacaactcttttggtgatatgagtttcatggaagagaagcctcagatgtacaacaatcagtttgggttaacaaactcgttcgatgctggaggtaacaatggataccagtatttcagttccgatcagggcagtaactccttcgactgttctgagttcgggtggagtgatcacggccctaaaacacccgagatctcttcaatgcttgtcaataacaacgaagcatcatttgttgaagaaaccaatgcagccaagaagctcaaaccaaactctgatgagtcagacgatctgatggcataccttgacaacgccttgtgggacaccccactagaagtggaagccatgcttggcgcagatgctggtgctgtgactcaggaagaggaaaacccagtggagctatggagcttagatgagatcaatttcatgctggaaggagacttttgaagtgatcgatggttccttagtttgtaaataaagctgtgttggattttgctgttgggggatggtacaagtcacacctcaagctctatgcattggtatctcatgagcctctcttccatagagagtttctcttttaattttgtcgaaataaaaaaggtgtgatgaagtaaatagaggtataataatatctatctattaagtcttgttttgttctttcatttttgtatttcttttctatttaaaagacagtttattagtcttctgagctctctttttgatctttgttatagcgtatcatcaccctcgaaagtgtaatgttttgtacccccaaacttgtttagcattataataaagtctctttggaacttctc

SEQ ID NO: 168 - protein, 374 aa, Arabidopsis thaliana
MCGGAIISDFIPPPRSLRVTNEFIWPDLKNKVKASKKRSNKRSDFFDLDDDFEADFQGFKDDSAFDCEDDDDVFVNVKPFVFTATTKPVASAFVSTGSAYAKKTVESAEQAEKSSKRKRKNQYRGIRQRPWGKWAAEIRDPRKGSREWLGTFDTAEEAARAYDAAARRIRGTKAKVNFPEEKNPSVVSQKRPSAKTNNLQKSVAKPNKSVTLVQQPTHLSQQYCNNSFDNSFGDMSFMEEKPQMYNNQFGLTNSFDAGGNNGYQYFSSDQGSNSFDCSEFGWSDHGPKTPEISSMLVNNNEASFVEETNAAKKLKPNSDESDDLMAYLDNALWDTPLEVEAMLGADAGAVTQEEENPVELWSLDEINFMLEGDF

SEQ ID NO: 169 - DNA, 1071 bp, Arabidopsis thaliana
ataaaggcatttcagctccaccgtaggaaactttctcttgaaagaaacccacagcaacaaacagagaaaatgtgtggcggtgctattatttccgattatgcccctctcgtcaccaaggccaagggccgtaaactcacggctgaggaactctggtcagagctcgatgcttccgccgccgacgacttctggggtttctattccacctccaaactccatcccaccaaccaagttaacgtgaaagaggaggcagtgaagaaggagcaggcaacagagccggggaaacggaggaagaggaagaatgtttatagagggatacgtaagcgtccatggggaaaatgggcggctgagattcgagatccacgaaaaggtgttagagtttggcttggtacgttcaacacggcggaggaagctgccatggcttatgatgttgcggccaagcagatccgtggtgataaagccaagctcaacttcccagatctgcaccatcctcctcctcctaattatactcctccgccgtcatcgccacgatcaaccgatcagcctccggcgaagaaggtctgcgttgtctctcagagtgagagcgagttaagtcagccgagtttcccggtggagtgtataggatttggaaatggggacgagtttcagaacctgagttacggatttgagccggattatgatctgaaacagcagatatcgagcttggaatcgttccttgagctggacggtaacacggcggagcaaccgagtcagcttgatgagtccgtttccgaggtggatatgtggatgcttgatgatgtcattgcgtcgtatgagtaaaagaaaaaaaataagtttaaaaaaagttaaataaagtctgtaatatatatgtaaccgccgttacttttaaaaggtttttaccgtcgcattggactgctgatgatgtctgttgtgtaatgtgtagaatgtgaccaaatggacgttatattacggtttgtggtattattagtttcttagatggaaaaacttacatgtgtaaataagatttgtaatgtaagacgaagtacttataacttcttaactgttttgtggtag

SEQ ID NO: 170 - protein, 248 aa, Arabidopsis thaliana
MCGGAIISDYAPLVTKAKGRKLTAEELWSELDASAADDFWGFYSTSKLHPTNQVNVKEEAVKKEQATEPGKRRKRKNVYRGIRKRPWGKWAAEIRDPRKGVRVWLGTFNTAEEAAMAYDVAAKQIRGDKAKLNFPDLHHPPPPNYTPPPSSPRSTDQPPAKKVCVVSQSESELSQPSFPVECIGFGNGDEFQNLSYGFEPDYDLKQQISSLESFLELDGNTAEQPSQLDESVSEVDMWMLDDVIASYE

SEQ ID NO: 171 - DNA, 1433 bp, Oryza sativa
agactacaagccattaaacagagacgaccaacgacttaaccacacttcttctttgtgctgtccaacctccattgttgggtgtgaaagctttggctcatctgccatgtgtggaggatccattctcggcgaccttcacttgccggtgcggcggacagtgaacgccggtgacctgtggggagacgccggcaagggtagagatggtggcgacggcttgaagaagaggaaggggagttcttgggatttcgatgttgattgcgatgatgatgatgatgatgactttgaggctgattttgaggagtttgaggatgactatggcgatgatgatgatgtgggtttcggggacgacgaccaagaatccgacatgaacggtctcaagctcgccggattcagcaccacgaagctcggcctcggcggcagcaggaagaggaagacgcgataccgagggatccggcagcggccatgggggaaatgggcggcggagatcagggacccccgcaagggcgtccgcgtctggctcggcacgttcggcaccgccgaggaggccgccatggcgtacgacgtcgaggcacgccgcatccgcggcaagaaagccaaggtcaacttccccgacgccgccgccgccgccccgaagcggccacggcgttcttcggcgaagcattcgccgcagcagcagaaggccaggtcgtcgtcgtcgtcgccggcgagcctgaacgccagcgacgccgtgtccaagtccaacaacaaccgcgtcagctcggctgggagcagcaccgacgccaccgccgccgccatcgccatcgacgacggcgtcaagctcgagctgctctcggagacggatccttctccgcccatggccgccgccgccgccgcgtggctcgacgcgttcgagctgaacgatcttgacggatcaagatgcaaggacaacgcattcgatcaccagattcacaaggtagaagcggctgtcgctgatgaattcgcgttctacgacgatccgagctacatgcagctgggttaccagctcgatcagggcaactcgtacgagaacatcgacgcgctcttcggcggcgaggccgtcaacattggtggactctggagcttcgacgacatgccaatggagttcagagcttattgagcatttgattctatttaggagggagtgaattatttgggaggaagaatcgatgttgtaacttgtaaaatctctgatgatgatctctgcatcatatgatcaatttgagtgcagttttgtttttgtaaatacgaattctttattatgatgttaggttcttaatttgcccttcttcatcagggatttgttcaggcttttgttgtgatgactgattggacgagggaaagattgcgttttttgttgtcatgttgggtactctactcttctgttcctaaagttgataagtgccaaaatttgtgagagg

SEQ ID NO: 172 - protein, 342 aa, Oryza sativa
MCGGSILGDLHLPVRRTVNAGDLWGDAGKGRDGGDGLKKRKGSSWDFDVDCDDDDDDDFEADFEEFEDDYGDDDDVGFGDDDQESDMNGLKLAGFSTTKLGLGGSRKRKTRYRGIRQRPWGKWAAEIRDPRKGVRVWLGTFGTAEEAAMAYDVEARRIRGKKAKVNFPDAAAAAPKRPRRSSAKHSPQQQKARSSSSSPASLNASDAVSKSNNNRVSSAGSSTDATAAAIAIDDGVKLELLSETDPSPPMAAAAAAWLDAFELNDLDGSRCKDNAFDHQIHKVEAAVADEFAFYDDPSYMQLGYQLDQGNSYENIDALFGGEAVNIGGLWSFDDMPMEFRAY

SEQ ID NO: 173 - DNA, 749 bp, Oryza sativa
ctcgcgccatccaagcgcccgcctctatatatgcgcgccgccaccatgtccagctccggcaactagctactgcgaagtgcgaactgatcagatcgtcgagaggaaacccaagatccaacgacgacatgtgtggcggcgcgattctggctaacatcataccggccaccccacgcccccgcaagtgccgccccaccaccgccaccgccacccccaaggcgacgacaccgaacgtcgtcgtcgtcgtcaacctcgtcgacaaagaggccgaggtcagcgagagctccggtgccagcagcagcgcgctgccggacttctcgtggcagggcatgtcggcgtcgtccgacgacgacgccgcggcgcagcaggcactcctcgacgccgccggcggcgccaagaagcgtccccggagcgagccccacgtcacctccgacgacgaagtgctcccggcgtcattcgacagtgacaacaacaccgccgccgccggcctgctcccgctcgacgatcctttcttgttcggcgaccagttcggcgacctcaacggcggcgcgttcgcctcgctcatggacgggctgttcgccgccggtgaagcgaacgtcgccggcgagagcgtggggctctggagcttcggcgacgactttctcaacgcgtcgtactattagctagggcttccatagttcttgtactttacttgtactgtactgtattgtactgattgttaacgttgccataaagcaatcttgctagtttgt

SEQ ID NO: 174 - protein, 321 aa, Oryza sativa
MCGGAILANIIPATPPRPATAAHVWPGGDGEKRRKVGGGGCDDDFEAAFERFGREDSEMEEEEVEEVVVGKKAAVRRRRATPAAGRRARPSKYWGVRRRPWGKWAAEIRDPVEGVRVWLGTFATAEAAAHAYDAAARDLRGATAKLNFPSSSSSTAATPRPRKCRPTTATATPKATTPNVVVVVNLVDKEAEVSESSGASSSALPDFSWQGMSASSDDDAAAQQALLDAAGGAKKRPRSEPHVTSDDEVLPASFDSDNNTAAAGLLPLDDPFLFGDQFGDLNGGAFASLMDGLFAAGEANVAGESVGLWSFGDDFLNASYY

SEQ ID NO: 175 - DNA, 1192 bp, Oryza sativa
tcatcacaagctcacaagttcacaacccaacacccaaaagcaaaagaaaagcagcaaccaaagatgtgcggcggagcgatccttgcggagctcataccgagcgcgccggcggcgaggcgcgtcacggcgggccacgtctggccgggcgacgccaacaaggccaagaagaagggcgcgcgcgccgacgacttcgaggccgcgttccgcgacttcgacaacgactccgatgacgaggagatgatggtggaggaggcggaggaggaggaggcgacctccgagcacaagccgttcgtcttccgcgccaagaaggcggcggcggcggcgtcgagcaggcgcaggaagccggcgcagtacaggggcgtgcggcgccggccgtgggggaagtgggcggcggagatccgcgaccccgtcaagggcatccgcgtctggctcggcaccttcaccaacgccgaggccgccgcgctcgcctacgacgacgccgcgcgcgccatccgcggggacagggccaagctcaacttcccttccgctaccacccctgacacccgcaagcgcggccgcgccaccgccgccgccgccccggccgtcaaggcgaccccggtcatcaacctcgtcgaggaggaggacgaggaggaggtcgccgccgccatggcgtccatcaagtacgagcccgagaccagcgagagctccgagtcgaacgccctcccggacttctcctggcagggcatgtcggcctccgacgagttcgccgtcgccgcggcggcgctgtcgctcgacagcgacgacgacctcgccaagaagcgtccgaggaccgagccggaggacaccaccgactccggctccggcgacgacaccgacgcgctgttcgacgcgctgctgttcgccgaccagtacaaccacttcaacggcggcgcctacgagtccctggacagcctgttcagcgccgacgccgtgcagaccaccgccgccgccgccgccgccgaccagggcatggggctctggagcttcgacgacggctgctgcctcgtcgacgtcgaggccagcttgtccttctaggctctagccgtcgtctccggcgaccctgtgactcgatcttgtaccatgtcatgtacatagaagagtggttttgccaagcaagcatgtgttcgtcctggttcctttcggtaatgaaaaattatgtgaggcttctcgttct

SEQ ID NO: 176 - protein, 329 aa, Oryza sativa
MCGGAILAELIPSAPAARRVTAGHVWPGDANKAKKKGARADDFEAAFRDFDNDSDDEEMMVEEAEEEEATSEHKPFVFRAKKAAAAASSRRRKPAQYRGVRRRPWGKWAAEIRDPVKGIRVWLGTFTNAEAAALAYDDAARAIRGDRAKLNFPSATTPDTRKRGRATAAAAPAVKATPVINLVEEEDEEEVAAAMASIKYEPETSESSESNALPDFSWQGMSASDEFAVAAAALSLDSDDDLAKKRPRTEPEDTTDSGSGDDTDALFDALLFADQYNHFNGGAYESLDSLFSADAVQTTAAAAAADQGMGLWSFDDGCCLVDVEASLSF

SEQ ID NO: 177 - DNA, 789 bp, Arabidopsis thaliana
atgtgcggaggagctgtaatttccgattacatagcgccggagaagattgcgagatcatctggaaagtcttcctggagaagtaatggcgtctttgactgctcaatctacgatttcgatggaaatttcgatgaattagagtccgatgagccatttgtcttctcctctactcacaaacatcatgcttcaggctcagcatcagatgggaagaagaaacagagcagtcggtacaaaggaatcagaagaaggccttggggaagatgggcggctgagatacgtgatccaatcaaaggagttcgagtttggctcgggactttcaacacagctgaagaagctgcaagagcttatgatcttgaagctaagagaatccgtggagccaaagctaagctcaatttccctaacgaatcctctggaaagaggaaagccaaggctaagactgtgcaacaggtagaggagaatcatgaggctgatcttgatgtggcggtggtaagctcagcgcctagtagtagctgtcttgatttcttgtgggaggagaataatccggacacgcttctgattgatacacaatggctcgaagatatcatcatgggcgatgcgaataagaaacatgaacctaatgatagtgaagaagccaacaacgttgatgcttctctgctttctgaagagcttcttgcttttgagaaccagaccgaatatttctcgcagatgccttttacggagggaaactgtgattcctcaacgtctctgagtagtctctttgatggaggcaatgacatgggtctatggtcctga

SEQ ID NO: 178 - protein, 262 aa, Arabidopsis thaliana
MCGGAVISDYIAPEKIARSSGKSSWRSNGVFDCSIYDFDGNFDELESDEPFVFSSTHKHHASGSASDGKKKQSSRYKGIRRRPWGRWAAEIRDPIKGVRVWLGTFNTAEEAARAYDLEAKRIRGAKAKLNFPNESSGKRKAKAKTVQQVEENHEADLDVAVVSSAPSSSCLDFLWEENNPDTLLIDTQWLEDIIMGDANKKHEPNDSEEANNVDASLLSEELLAFENQTEYFSQMPFTEGNCDSSTSLSSLFDGGNDMGLWS

SEQ ID NO: 179 - DNA, 1430 bp, Oryza sativa
cccgcgtcgcgccatagcgacgtctctcccggagaaagaagagcgcgccgcgccatgtgcggcggtgcaatcctcgccgatttcaccccggcgagggtgccccggcggctgaccgccgccgagctcctgccggtgaccccgactccccccgccgccgagaggagaaccacccggaagcgcaagtccgacgtcgacttcgaggcggagttcgagcttttcgaggacgacgacgacgacgatgagttcgagctttccgacgatggcgacgagagtttggccgtgtcatgtgtgtcgtcccccaagtcgaaggcagtaccttcgttttctttttcgtcggatgtctcctcgagctccaggccgcggcggcgcgtggcggcggcggcggccggtcgtcggaaggcgagcaagaagagcaagtacaggggcgtccggcgccggccgtcggggaggttcgcggcggagatcagggaccccaagaaggggcggcgcgtgtggctcggcacgtacggcagcgccgaggaggccgccatggcctacgaccgcgaggcccgccgcatccgcggcaagggcgcgaggctcaacttcccccgcgacggcgatggctcccctcgccggagtaacgaccggccctgctggaccatcgacctcaacctccccgcggcggccgtctccggtgacgacgacgacgccatggccgtcgacgccgcagacgcagacgcaggcagtgctggccgtgcagcagcctatgcagatcaagaagcactgagcgcggcaaagtgcaagatcaagcagtgtcctcgcgacgaacagatggcgagcgccacacctgagctcatggaggaggacgcgagcagcagcagaaacatggtgcccctgtccatggcgctgcagctgcagtatgcggcgatgatcgccgaatgcgaccgcgagatggaggagatcgccgccgtggagagggacctcgagaggcgcaggaggcaggtgttcgagcgcagaggccacctggtcaggcaggcctctcttctgctcgactgacgatcttgctgaactgaactctgaatgtttgagcttgtctgaagtctgaactctgcactatgccatatggtgtttcaccttcactgtgaggctgacatgtgggccagacgtccgtttgccttgcttgcttttgagctgcaactgggcgttgtgctgcaagcctgcaaagtgcctgtgtaaagtttgtgggattgtgtgtgtggatcttgtatccttgtgactttgcaagctttaattttgtgaggaacaatagtattttagattggtgtgtaaaatatagaaataaataatagtagcaactaaattttggttttcagctcttcatcagatggtttgtcatgggaacaaaatttcaaacatgagcaaattaaggtcatgttattatcaattgtgat

SEQ ID NO: 180 - protein, 326 aa, Oryza sativa
MCGGAILADFTPARVPRRLTAAELLPVTPTPPAAERRTTRKRKSDVDFEAEFELFEDDDDDDEFELSDDGDESLAVSCVSSPKSKAVPSFSFSSDVSSSSRPRRRVAAAAAGRRKASKKSKYRGVRRRPSGRFAAEIRDPKKGRRVWLGTYGSAEEAAMAYDREARRIRGKGARLNFPRDGDGSPRRSNDRPCWTIDLNLPAAAVSGDDDDAMAVDAADADAGSAGRAAAYADQEALSAAKCKIKQCPRDEQMASATPELMEEDASSSRNMVPLSMALQLQYAAMIAECDREMEEIAAVERDLERRRRQVFERRGHLVRQASLLLD

SEQ ID NO: 181 - DNA, 1049 bp, Oryza sativa
agaagaaaagccttgtgagttggtaattgatagtagcaagacaatgtgtgggggagcgatcatcgccgacttcgtcccgcccgccggcgcccgccgcgccgctgcctccgacatctccgacaacgccgtcctctccgctgccggtgccggtgacgagtcgttcgcggcggccaaggcgccggcgccggggaggaagacggcgtaccgcggcatccggcgccggccgtggggacgctgggcggcggagatccgcgacccgaggaagggcgcccgcgtctggctcggcacctacgccaccgccgaggaggccgcccgcgcctacgacgtcgcggcgcgcgacatccgcggcgccaaggccaagctcaacttccccccgaccatcggcgccgccgccgcgccaccgccgcccaagaagcgacgcaaagccgccgccgcggcgaaccaccaccaccaccaccaccagcaggagagctcaggctcctcgtcggcgtcgtcgctgcctcccaccccgccgccggccgccgagcaccagctccgcgagtgcatgtccgggctggaggcgttcttgggcctcgaggaggaggaggacgacggcggcgccggtgagccatgggacgccgtcgacatgatgctcgagtaggctcgccgggaatggcagcgttgccatgctcatgcatccaagcttattcatgcatgcagcagcaagatatacaactttagtactactactatgttaattactacttactgcgtaggtaaatgaaataaaatggggttggttaattagggtgttcttctgggaatccttggctttgctaattgctagtactactatgtactttggcgttaagcattgcattgccaggtgatgcatgtcatgtaatcgtggtaattatatggccgtcctcctagagctagctagcagattagatttactatataaagtggtagtagaaatatatgtcctcctagagctaactagtgtcttgtaatgatttcagacttcttgggcaacatgagcaatgcatttcgacttccactttacatct

SEQ ID NO: 182 - protein, 198 aa, Oryza sativa
MCGGAIIADFVPPAGARRAAASDISDNAVLSAAGAGDESFAAAKAPAPGRKTAYRGIRRRPWGRWAAEIRDPRKGARVWLGTYATAEEAARAYDVAARDIRGAKAKLNFPPTIGAAAAPPPPKKRRKAAAAANHHHHHHQQESSGSSSASSLPPTPPPAAEHQLRECMSGLEAFLGLEEEEDDGGAGEPWDAVDMMLE

SEQ ID NO: 183 - DNA, 1164 bp, Oryza sativa
acctcgctctcctcgtcaccgcgatcgatcgatcgccgccggtttagatttccttcctacgcggaccgcacccacgcgctaggtttagctagctagtttgcttgcgcgcaagcgtcgatcgagctagctagtgaagatagatatgtgcggcggcgccatcccgctgatcagcagccgcggccccggcggcaagaggagcctctccgccgccgatgagctctggccgccgccgccgcagcacgccagcgacgacccggccgagcaagcggcggcggatgaggaggagcaggagcagcagccggcggcgaggaggcagcggcgaggggagcggaggacgctgtaccggggcatccggcgcaggccgtgggggaaatgggcggcggagatccgcgacccggccaagggcgcccgcgtctggctcggcaccttcgccaccgccgaggctgccgcgcgggcctacgaccgcgccgcccgccgcatccgcggcaccaaggccaaggtcaacttccccaacgaggacaacgccttcgccgccgcgccgccgccgtaccacctcgccgcctactacggcgacgcctcctccacctcctacctctacccgatggccatgacgcccgccgccgccggactgagggagcagcagctgatgacgacgacggcggtggagtacagcgttaatgacgccgtcgacgtggccagcgtttacttccagccgccgccgccggcggttgcttacgagttcagcgccgtcggcggtggcgccgtcgtcgtgccggtgtcggcggtggcgccggcgatgacgtacggacagagccaagaggtggcggctccgctcatgtggaatttcgatgacatcacggccatgccaatgtgattgtcttaccgtggagattaaggcatttaaaggcttatagataacataaatttgccatgtatgatcaatggttaattcctattgctcaagggcttatattaagggttacctacacggcatggctagcttagcctacaatttatgtttcttgcatttctttctctttttttgagatgagctagtgtgttatactatttgttcatcttttctggtagtggtggatacattttcgccggctagggttggaatttgtaaatagaagatggtcaataataagattgtttctggct

SEQ ID NO: 184 - protein, 243 aa, Oryza sativa
MCGGAIPLISSRGPGGKRSLSAADELWPPPPQHASDDPAEQAAADEEEQEQQPAARRQRRGERRTLYRGIRRRPWGKWAAEIRDPAKGARVWLGTFATAEAAARAYDRAARRIRGTKAKVNFPNEDNAFAAAPPPYHLAAYYGDASSTSYLYPMAMTPAAAGLREQQLMTTTAVEYSVNDAVDVASVYFQPPPPAVAYEFSAVGGGAVVVPVSAVAPAMTYGQSQEVAAPLMWNFDDITAMPM

SEQ ID NO: 185 - DNA, 1260 bp, Oryza sativa
gtctcaaacccaatcaaactccaaccaaactcacctacctacccccaacccatccagagctagagctatgtgcggcggcgcgatcctcgccgacctcataccgtcgccgcgctccggcggccacaccaaaaagaacaagcggcggcggatcagcgacgacgaggacttcgaggccgccttcgaggagttcgacgccggcgacgacgactccgactccgactccgagtccgaggaggtagacgagtacgacgtcgtcgtcgacgacgacgacagcgaggacggcgtggtggttcttccgccgccgccgccgccgccgccggtgattccacatgagcgccatggcgcgaggcggttccgcggcgtgaggaagcggccgtgggggaagtgggcggcggagatccgcgaccccgtgcgcggcgtgcgcgtctggctcggtaccttccccaccgccgagtccgccgcgcgcgcctacgacgccgccgcccgccgcctccgcggcgccaaggccaagcccaacttcccctccgcgccgccgccctcggctgctgctcaccgccgcaagaagcgccgcgcccacgccgccacgcgctcgccgtcgtctccgcccgccaccagcgaggtcacggcggcgtccgcgtccgcgtccagcgatgtccccgcgccggcgttcgcttccttcgtcggcgagcccgggcacggcggcgccaagtcgatgccgacgacgagccacacctcgcagccagccccgccggcgacggtggcgtccgagaacgtcgacgacccggaggtgttcgacccgtacgacgtccacggcggcctcgcctcctacttcgccggcggcgcgtacgagtccctggagagcctgttcgcgcacggcggcgacagcgccgccgtcgaccaagcggcgagcgaccactggccggcggcgctatggagcttcgcagacgacggctcgttctgcttctgatgctgtcaaatcacatcgccattggcggccattgcaagccatggcatggcacctgatgatgctgatccagtgaactggtcactcgttcttgatgcgttttcagtttcttgtacagtgtttttccccagcaacagtgaagtagtattcagttattcactgttcagtcatgagttcatcgcaaaatatgatgtaagtatgtgtcttgagattgttttagcagtggcttttgtttgtataatgtatttctctgtaattaattaatagctgttttcagtgataaactaaattttctg

SEQ ID NO: 186 - protein, 322 aa, Oryza sativa
MSQTQSNSNQTHLPTPNPSRARAMCGGAILADLIPSPRSGGHTKKNKRRRISDDEDFEAAFEEFDAGDDDSDSDSESEEVDEYDVVVDDDDSEDGVVVLPPPPPPPPVIPHERHGARRFRGVRKRPWGKWAAEIRDPVRGVRVWLGTFPTAESAARAYDAAARRLRGAKAKPNFPSAPPPSAAAHRRKKRRAHAATRSPSSPPATSEVTAASASASSDVPAPAFASFVGEPGHGGAKSMPTTSHTSQPAPPATVASENVDDPEVFDPYDVHGGLASYFAGGAYESLESLFAHGGDSAAVDQAASDHWPAALWSFADDGSFCF

SEQ ID NO: 187 - DNA, 699 bp, Oryza sativa
atgcgccgccgcgtctcctcctcctcctcctcctcctcgtcctcgtcgccggcgaggcatcacaaggcgcggcgcagcaggaggaagctcgccgtcgacgaggactgggaggccgccttccgcgagttcctctcccgcgaccacgacgacgacgacgacgaccacgacggtcagcatgtcgttgttgcgccgttgatccgtggtagtgacaagtgcgtccacggccacgaggtggtggcgtcgacggtcggcggtggcgcaagcggcggacgacgacgagccgacgacgacgacggcgagcggcggcggcggcggcggagggagaagcggagctacccgtaccgcggcatccggcagcggccgtgggggaggtgggcgtcggagatccgcgaccccgtcaagggcatccgcgtctggctcggcaccttcgacaccgccgagggcgccgcgcgcgcctacgacgacgaggttcgccgcatctacggcggcaacgccaagaccaacttccccccatcgccgcccacgccgccgccgccggagaagccagcggcggagaggagcccctcgacgacgccgacgacgaccacggaggactccggcgactcgcgcatactcatcgagtgctgctccgacgacctgatggacagcctcctcgccgccttcgacatgaccaccggcgacatgcgcttctggagctaa

SEQ ID NO: 188 - protein, 232 aa, Oryza sativa
MRRRVSSSSSSSSSSSPARHHKARRSRRKLAVDEDWEAAFREFLSRDHDDDDDDHDGQHVVVAPLIRGSDKCVHGHEVVASTVGGGASGGRRRADDDDGERRRRRRREKRSYPYRGIRQRPWGRWASEIRDPVKGIRVWLGTFDTAEGAARAYDDEVRRIYGGNAKTNFPPSPPTPPPPEKPAAERSPSTTPTTTTEDSGDSRILIECCSDDLMDSLLAAFDMTTGDMRFWS

SEQ ID NO: 189 - DNA, 1391 bp, Lycopersicon esculentum
ttcaaattgagctttttctccattaaaattctctctgcaaatttatagtttttcttttttcactttttgagaagaaatcaaaagctatgtgtggtggtgcaattatctccgatttggtacctcctagccggatttctcgccggttaaccgctgattttctatggggtacatccgatctgaacaagaagaagaagaaccctagtaattaccactcaaagcccttgaggtctaagtttattgaccttgaagatgaatttgaagctgactttcagcacttcaaggataattctgatgatgatgatgatgtgaaggcatttggccccaaatccgtgagatctggtgattcaaactgcgaagctgacagatcctccaagagaaagaggaagaatcagtaccgggggatcagacagcgtccttggggtaagtgggcagctgaaatacgtgatccaaggaaaggtattcgagtctggcttggtactttcaattcagccgaagaggcagccagagcttatgatgctgaggcgcgaaggatcagaggcaagaaagctaaggtgaactttcctgatgaagctccagtgtctgtttcaagacgtgctattaagcaaaatccccaaaaggcacttcgtgaggaaaccctgaacacagttcagcccaacatgacttatattagtaacttggatggtggatctgatgattcgttcagttttttcgaagagaaaccagcaaccaagcagtacggcttcgagaatgtgtcttttactgctgtagatatgggactgggctcagtttccccttcagctggtacaaatgtttacttcagctctgatgaagcaagtaacacttttgactgctctgatttcggttgggctgaaccgtgtgcaaggactccagagatctcatctgttctgtcggaagttctggaaaccaatgagactcattttgatgatgattccagaccagagaaaaaactgaagtcctgttccagcacttcattgacagttgacggtaacactgtgaacacgctatctgaagagctatcggcttttgaatcccagatgaagttcttgcagatcccatatctcgagggaaattgggatgcatcggttgatgccttcctcaatacaagtgcaattcaggatggtggaaacgccatggacctttggtccttcgatgatgtaccttctttaatgggaggtgcctactaagctgcatacacatcttcccctgctaagttttgtaaataacgcttcatttgagtgaagtttgcgcctgcgtttacgtttatcaccaaactaaaagactatatatgtgttgtattaatttattcaaaatttactcgtttgatatatgtaagtatgtatccttgttttcataaaaaaaaaaaaaaaaaa

SEQ ID NO: 190 - protein, 372 aa, Lycopersicon esculentum
MCGGAIISDLVPPSRISRRLTADFLWGTSDLNKKKKNPSNYHSKPLRSKFIDLEDEFEADFQHFKDNSDDDDDVKAFGPKSVRSGDSNCEADRSSKRKRKNQYRGIRQRPWGKWAAEIRDPRKGIRVWLGTFNSAEEAARAYDAEARRIRGKKAKVNFPDEAPVSVSRRAIKQNPQKALREETLNTVQPNMTYISNLDGGSDDSFSFFEEKPATKQYGFENVSFTAVDMGLGSVSPSAGTNVYFSSDEASNTFDCSDFGWAEPCARTPEISSVLSEVLETNETHFDDDSRPEKKLKSCSSTSLTVDGNTVNTLSEELSAFESQMKFLQIPYLEGNWDASVDAFLNTSAIQDGGNAMDLWSFDDVPSLMGGAY

SEQ ID NO: 191 - DNA, 1107 bp, Oryza sativa
agatattcagacacacaccttcaataacttgcaaggataactcaaactacttgaatcagatcagacaaaaacatcataagaatatcacgatgtgtggaggagcactgatcccgaacgactatggcgacaagccgccgccgccgccgtcggagtcgtcggagtgggacgccacaacgaagatgaagaagaagaagaagcgtggtggcggcggcgacgacgactgggaggccgccttccgggagttcatcgctggcgacgacgacgacgacgacggcggcgtttccatgttcccttctggtgcagggacgatggagacgaccacagaggtggcgccggcggcggcggtggtggagaggccgcggcggcggcgaagggtgaggcggagctacccgtaccgcggcgtccggcagcggccgtgggggcggtgggcgtcggagatccgcgaccccgtcaagggcgcccgcgtctggctcggcaccttcgacaccgccgtcgaggccgcgcgcgcctacgacgccgaggcgcgccgcatccacggccacaaggcaaggaccaacttcccgcccgacgagcctccgctgccggcgccatcgcaggcgccgttctgcttcctgctcgacgacgacgacgacgacgacggcgtggcccgtggaaacagcccggcgtcgtcgtcggcgccggacagagcctccgcttgcacgacgtcgtcgacggtggcgtccggcgagcgaggcgatgagctcatactgctggagtgctgctccgacgacgtgatggacagcctcctcgccggcttcgacgtgtccagcgaaccacgcagtgttttgggaatggttaattagcagcgcgcacgcctgattagatcggtacatgtgaagtacaagagaagtagttactactagctaggagcaaattaacttggagtgcaagaataaaatatgcatgtctctgcactactactgtagtgttagcaagtttgctcattgttctgttgtatcctttcatgtccatttcagacttcccaatgctacataaggatgtacatatgtatgatgttgtgtgccttgttaatcaatgaatgtaaatatctttatattgcttttgtac

SEQ ID NO: 192 - protein, 250 aa, Oryza sativa
MCGGALIPNDYGDKPPPPPSESSEWDATTKMKKKKKRGGGGDDDWEAAFREFIAGDDDDDDGGVSMFPSGAGTMETTTEVAPAAAVVERPRRRRRVRRSYPYRGVRQRPWGRWASEIRDPVKGARVWLGTFDTAVEAARAYDAEARRIHGHKARTNFPPDEPPLPAPSQAPFCFLLDDDDDDDGVARGNSPASSSAPDRASACTTSSTVASGERGDELILLECCSDDVMDSLLAGFDVSSEPRSVLGMVN

SEQ ID NO: 193 - DNA, 1552 bp, Lycopersicon esculentum
gacaattatacattttccgtcaaaacataaatcatgtgtggtggttctataatctccgattacatagaccctagccggacttctcgccggctcaccgccgagtttctatggggtcgtttcgatctcggtaagaagcaaaaaaatcccaacaattatcactctaaagctaagcatttgcgatctgaagttgttgacgactttgaagccgattttcaggacttcaaagagttatccgatgatgaggatgttcaagtcgatgtcaagccatttgccttctctgcttccaaacactctactggttccaaatctttgaaaactgttgattcagacaaggatgctgctgctgataaatcctctaagagaaagaggaagaatcaatatagagggatcagacagagaccttggggtaagtgggcagctgaaatacgtgacccaaggaaaggggttcgggtctggctgggaaccttcaatactgcagaagaagctgccaaagcttatgatattgaggcgaggaggatcagaggcaagaaggctaaggtaaactttcctgatgaagctcccgcccctgcatcaagacacactgttaaggtgaatcctcagaaggtccttcctgaggagagcctgtattcacttcagtccgactcagcaatcatgaacagcgtggaggatgaccattatgattcttttggattttttgaagagaaacccatgacaaaacagtatggatatgagaatgggagcagtgcttctgcagatacgggatttggttcgttcgtcccttcagctggcggtgatatctacttcaactctgatgtaggaagcaactcttttgaatgctctgattttggttggggagagccatgctccaggactccagagatatcatctgttctgtcagctgctattgaatgtaatgaagctcaatttgttgaagatgccaattctcagaaaaagttgaaatcatgcaccaacaaccccgtagctgatgatggaaacccccgttactatggtacctgaagagcttccagcttttgaacctcagatgaatttctttcatctcccatatatggagggaaattgggatgcatcaggtggtaacttcctcaacacaagtgcaactcaaaatggtggtgaaaatgctatggacctgtggtcctttgatgatgttccttctttaatgggaggtatcttttaagtcaacatgccttgagttttgtaaataaggcttcatgtgagtgattttttgctgttgtataatgtacttagtgcaaatatttgatatgttaatttgatctccgttaacttgttcttttaggtgtgtctggtggtggaagaagaatgatccacagagaaccatgattaagccatggataatgcactaagtagagcagtgcataggtaattaggtttaattaactactagtagagatgttaaattcgagttttacttaaaaacaattgggctgtatggattatgagaattgatgagacctcgatgcttgctataacgttacctttttagtgttgctttcacaaaaaaaaaaaaaaaaaa

SEQ ID NO: 194 - protein, 327 aa, Lycopersicon esculentum
MCGGSIISDYIDPSRTSRRLTAEFLWGRFDLGKKQKNPNNYHSKAKHLRSEVVDDFEADFQDFKELSDDEDVQVDVKPFAFSASKHSTGSKSLKTVDSDKDAAADKSSKRKRKNQYRGIRQRPWGKWAAEIRDPRKGVRVWLGTFNTAEEAAKAYDIEARRIRGKKAKVNFPDEAPAPASRHTVKVNPQKVLPEESLYSLQSDSAIMNSVEDDHYDSFGFFEEKPMTKQYGYENGSSASADTGFGSFVPSAGGDIYFNSDVGSNSFECSDFGWGEPCSRTPEISSVLSAAIECNEAQFVEDANSQKKLKSCTNNPVADDGNPRYYGT

SEQ ID NO: 195 - DNA, 993 bp, Lycopersicon esculentum
tcatttctgtatcaatcaatattctttgtttctgctgttttgatgaaatcacactaagatgtgtggtggtgcaattcttgctgatatcattcctcctcgtgaccgccgtttgtcatccaccgacctatggccgactgatttctggccaatttccacccaaaatgttcctctcaaccccaaacgagctcgaccctctacaggtggtgagcagatgaagaagaggcaaaggaagaatctttacagagggataagacaacgtccatggggtaaatgggctgctgaaattcgtgacccgagaaaaggggttagggtttggttaggtactttcaacactgctgaagaagctgcaagagcttatgatagagaagctcgtaaaatcaggggtaagaaagctaaagttaatttccccaatgaagatgacgaccattactgctacagtcatccagagccccctcccttgaacattgcttgtgatactactgttacttacaatcaagaatcaaataactgttaccccttttactcaatcgagaacgttgaacctgttatggaatttgcaagttataatggaattgaagatggaggagaggagatggtgaaaaatttgaataacagggttgtagaggaagaggagaaaacagaggatgaagtgcagatactttctgatgagctgatggcttatgagtcattgatgaagttctatgaaataccgtatgttgacgggcaatcagtggcggcgacggtgaatccagcggcggagaccgccgtgggcggtggctcgatggagctttggagttttgatgatgttagtcgtctacaaccaagttataatgtagtttaattattgttttgtttaaacttttcataattttattttatcgaattaggaagaattgagtttttataatttaatcaattgtgtaaaactatgtttctaattcattaatattatattggatatgttgtttttaaaaaaaaaaaaaaaaaaaaaaa

SEQ ID NO: 196 - protein, 260 aa, Lycopersicon esculentum
MCGGAILADIIPPRDRRLSSTDLWPTDFWPISTQNVPLNPKRARPSTGGEQMKKRQRKNLYRGIRQRPWGKWAAEIRDPRKGVRVWLGTFNTAEEAARAYDREARKIRGKKAKVNFPNEDDDHYCYSHPEPPPLNIACDTTVTYNQESNNCYPFYSIENVEPVMEFASYNGIEDGGEEMVKNLNNRVVEEEEKTEDEVQILSDELMAYESLMKFYEIPYVDGQSVAATVNPAAETAVGGGSMELWSFDDVSRLQPSYNVV

SEQ ID NO: 197 - DNA, 771 bp, Arabidopsis thaliana
atggaaaacagctacaccgttgatggtcaccgtcttcaatattccgttccgttaagctccatgcatgaaaccagtcaaaactccgaaacttacggattatccaaagagtcgccgttggtctgcatgcccttgttcgaaaccaacactacttcattcgatatctcttctcttttctcgtttaacccaaaaccagaacccgaaaacacgcatcgtgtcatggacgattccatcgccgccgtcgtgggcgaaaacgttcttttcggtgataaaaacaaagtctctgatcacttgaccaaagaaggtggtgtgaagcgggggcggaagatgccgcagaagaccggaggattcatgggagtgagaaaacggccgtgggggagatggtcggcggagataagagacaggatagggcggtgcagacactggttaggaacgttcgacacggcggaagaggcagcgcgtgcgtatgacgcggcggcgaggaggcttagagggaccaaagccaagaccaatttcgtgattcctccgctttttcccaaggaaatagctcaggctcaggaggataataggatgaggcagaagcagaagaagaagaagaagaaaaaagtgagtgtgaggaagtgtgttaaagtcacatcggttgcacagttgttcgatgatgccaattttataaattcttctagtattaaaggaaatgtgattagttctattgataatcttgaaaaaatgggtctagagcttgatttgagtttagggttgttgtctaggaagtga

SEQ ID NO: 198 - protein, 256 aa, Arabidopsis thaliana
MENSYTVDGHRLQYSVPLSSMHETSQNSETYGLSKESPLVCMPLFETNTTSFDISSLFSFNPKPEPENTHRVMDDSIAAVVGENVLFGDKNKVSDHLTKEGGVKRGRKMPQKTGGFMGVRKRPWGRWSAEIRDRIGRCRHWLGTFDTAEEAARAYDAAARRLRGTKAKTNFVIPPLFPKEIAQAQEDNRMRQKQKKKKKKKVSVRKCVKVTSVAQLFDDANFINSSSIKGNVISSIDNLEKMGLELDLSLGLLSRK

SEQ ID NO: 199 - DNA, 1413 bp, Nicotiana tabacum
gaattcggcacgagaaaaaagaaagaagtttactccgtcaaaaacgaaactgatttctgcataaaacttttctgctgagagaaaacaaaaagcatgtgtggtggtgctataatctccgattacattgccccgagccgaacttctcgccggctcaccgccgagttgctatggggccggtccgatctgagtaataagcaaaaaaatcctaacaattatcactccaagccgttgagatcccaagtagttgacctagacgatgacttcgaggctgattttcaggactttaaagatttctccgatgacgaggatgttcaagtcgatgtcaagccatttgccttctctgcttcgaaaaactctaatgttgaaggctccaaatctgtgaaaactgatgattcagacaaggatgctgatagatcctctaagagaaagaggaagaatcagtatagggggatcagacagcgaccttggggtaagtgggcagctgaaatacgtgacccaagaaaaggggttcgggtgtggctgggaactttcaatactgcagaagaagctgccagagcttatgatgttgaggctaggaggatcagaggcaataaagctaaggtaaactttcccgatgaagctccagtgcctgcctcgagacgtactgttaaggtgaatcctcaaaaggtccttcctaaggagatcctggactcggttcagcccgactcgactatcataaacaacatggaggattgctgttatgattctttgggatttcttgaagagaaacccatgacgaagcagtttggatgtgaggatgggagcagtgcttctggagatacgggatttggctcatttgccccttcagctggtaccgatatctacttcaactctgatgttggaagtaactcttttgactgctctgattttggttggggagagccatgtgccaggactccagagatatcatccgttctgtcagctgttattgaaagcaatgaatctcaacttgttgaagatgataccagtccaatgaaaaaactgaaatcaagccccattaatccagtagctgatgatggaaataccgcaaacaagctatctgaagagctttcagcttttgaaacccagatgaagttccttcagatcccctatctggagggaaattgggatgcatcagttgatactttcctcaactcaagtgcaactcaggatggtgataatgctatggacttatggtcctttgatgatgttccttctttattgggaggtgtcttttaagtcagcatgccttgtctagtttttgtaaataaggcttcatgtgagtgaactttgctattgttttgcctcaaagaaaggctctttattatgtacagaagctttttgaaatggtaaatagtttaatctctgtttaaaaaaaaaaaaaaaaaaaaaaaa

SEQ ID NO: 200 - protein, 387 aa, Nicotiana tabacum
MCGGAIISDYIAPSRTSRRLTAELLWGRSDLSNKQKNPNNYHSKPLRSQVVDLDDDFEADFQDFKDFSDDEDVQVDVKPFAFSASKNSNVEGSKSVKTDDSDKDADRSSKRKRKNQYRGIRQRPWGKWAAEIRDPRKGVRVWLGTFNTAEEAARAYDVEARRIRGNKAKVNFPDEAPVPASRRTVKVNPQKVLPKEILDSVQPDSTIINNMEDCCYDSLGFLEEKPMTKQFGCEDGSSASGDTGFGSFAPSAGTDIYFNSDVGSNSFDCSDFGWGEPCARTPEISSVLSAVIESNESQLVEDDTSPMKKLKSSPINPVADDGNTANKLSEELSAFETQMKFLQIPYLEGNWDASVDTFLNSSATQDGDNAMDLWSFDDVPSLLGGVF

SEQ ID NO: 201 - DNA, 1605 bp, Fagus sylvatica
caaacacactgaagaattaagtcatttgggaatcaggtttcttggaaaaacccctgccaaagccccttcaaggctctcagctttgagtccccagatgtgtggaggagctataatctccgactttatagcgccaaccgggtcgcggcggttgacggcggattatctctggggcgatcggaaaaaacccatttcaggaaagcgattctcgaagcctgtagtcgatttggacgacgaattcgagctcgattttcagggctttaaggacgaggaggagtctgatatcgacgaggaagaggtccttgtgcaagatgtcaagcccttcactttttctgctcctcctagctctggatctaagcctgtaaaatccgtggaattcaatgggcaagctgagaaatctgcaaagagaaagaggaagaatcagtatcgggggatccggcagcgcccatggggtaagtgggctgctgagattcgagacccaaggaaaggggtccgtgtctggcttggaacttttaacactgcagaaaaagctgcaagagcttatgatgcagaggcacggagaattcgtggcaagaaggctaaggtgaattttcccgatgagactccccgtgcttctccaaagcgttcagttaaggcaaatctgcagaagccacttgccaaggcaaacctgaactctgtccagcccaacctgaaccaaaatttcaattttatgaacaactctgatcaggactataccatgggtttgatggaagagaaacctttcacaaaccagtatgggtatatggattccatccctgccaatgcagatgttggactaaaaccctttgcttccaataatactaccccgtactttaactcagatcaggggagtaactcgtttgattgttctgactatggatggggagaacagggctctaagactccagaaatctcatctgttctttcagctactttagaaggggatgaatctcagtttgtggaggatgctatgcccacgaagaaattgaagtcagactctgggaatgcagtgttcattgaaaataacactgcaaagacactgtcagaggagctctcagcttttgagtcccagatgaactttcagatgccatttcttgagggaagctgggaatccaacatggaggcactgttcagtggggacacaactcaggatggtaactcgatggatctttggagcttcgatgacctccccgttatggctgggggagttctgtgaccgcaaaactattttccgcatgcttgctgttctagtttatgtataaataaggctaaatacatgttagaatggtttgtcattctgtggagatggacatgcctgtggtttcaaacaagctgaacactgaatgcttaagactctatgaagggatgtactgaagtagtgttgttctactgttgtatgagggagtacataggtccctatttaggatccctttgagagactaccttgaagacattgaattttgggattttgaatttgatgtttttgtattgatgattatgtgtgatgaaacctctgtcataaaaatactaaactaaaaacctgatgtatgtcaactgtgtttagtgtttgtttcaaaaaaaaaaaaaaaa

SEQ ID NO: 202 - protein, 378 aa, Fagus sylvatica
MCGGAIISDFIAPTGSRRLTADYLWGDRKKPISGKRFSKPVVDLDDEFELDFQGFKDEEESDIDEEEVLVQDVKPFTFSAPPSSGSKPVKSVEFNGQAEKSAKRKRKNQYRGIRQRPWGKWAAEIRDPRKGVRVWLGTFNTAEKAARAYDAEARRIRGKKAKVNFPDETPRASPKRSVKANLQKPLAKANLNSVQPNLNQNFNFMNNSDQDYTMGLMEEKPFTNQYGYMDSIPANADVGLKPFASNNTTPYFNSDQGSNSFDCSDYGWGEQGSKTPEISSVLSATLEGDESQFVEDAMPTKKLKSDSGNAVFIENNTAKTLSEELSAFESQMNFQMPFLEGSWESNMEALFSGDTTQDGNSMDLWSFDDLPVMAGGVL

SEQ ID NO: 203 - DNA, 1653 bp, Fagus sylvatica
caacaatattttctctcacaaaaactaaactctctgtatttcccaaactttccaaaaaaaccattttacttttcacccatccgagcaaaaaaaacaaagagaaaaaagaaacccctccaaaaaagccaagaccgccatgtgtggaggagctataatctccgactttatagcgccaaccgggtcgcggcggttgacggcggattatctctggggcgatcggaaaaaacccatttcaggaaagcgattctcgaagcctgtagtcgatttggacgacgaattcgagctcgattttcagggcttcaaggacgaggaggagtctgatatcgacgaggaagaggtccttgtgcaagatgtcaagcccttcactttttctgctcctcctagctctggatctaagcctgtaaaatccgtggaattcaatgggcaagctgagaaatctgcaaagagaaagaggaagaatcagtatcgggggatccggcagcgcccatggggtaagtgggctgctgagattcgagacccaaggaaaggggtccgtgtctggctcggaacttttaacactgcagaagaagctgcaagagcttatgatgcagaagcacggagaattcgtggcaagaaaagcaaagggaattttccgatgagacttcccgtgccaaagcgttcagttaaggcaaatctgcagaagccacttgccaaggcaaacctgaactctgtccagcccaacctgaaccaaaatttcaattttatgaactctgatcaggactataccatgggtttgatggaagagaaacctttcacgaaccagtatgggtatatggattccatccctgtcaatgcagatgttggactaaaatcctttgcttccaataatactgccccatactttaactcagatcaggggagtaactcgtttgattgttctgactatggatggggagaacagggctctaagactccagaaatctcatctgttctttcagccactttagaaggggatgaatctcagtttgtggaggatgctgtgcccacgaagaaattgaagtcagactctgggaatgcagtgttcattgaaaataacactgcaaagacactgtcagaggagctctcagcttttgagtcccagatgaactttcagatgccatttcttgagggaagctgggaatccaacatggaggcactgttcagtggggacacaactcaggatggtaactcgatggatctttggagcttcgatgacctccccgttatggctgggggagttctgtgagcaaactattcccatgcttgctagtttatgtaaataaggctacatgttagaatggtttgtcatctgtgatggacatgccgtttcaaacaagctgtgaacatgcttaagactcttatgaaggatgtactgaagtagtctactgttgtatgaggagtacataggtatttaggatccctttctcccttgaagacattgaatttgggattttgaatttgatctttgtattgatgattatgtgtgatctgtcataaaaatactaaaaacctgatgtatgtcaactttagtgtttgtttctatcttggttcttttacaaaaagggccttcaatttttgtactgtttatttgtttttattggtttttgattttacctaaaaaaaaaaaaaaaaaaa

SEQ ID NO: 204 - protein, 375 aa, Fagus sylvatica
MCGGAIISDFIAPTGSRRLTADYLWGDRKKPISGKRFSKPVVDLDDEFELDFQGFKDEEESDIDEEEVLVQDVKPFTFSAPPSSGSKPVKSVEFNGQAEKSAKRKRKNQYRGIRQRPWGKWAAEIRDPRKGVRVWLGTFNTAEEAARAYDAEARRIRGKKSKGNFPMRLPVPKRSVKANLQKPLAKANLNSVQPNLNQNFNFMNSDQDYTMGLMEEKPFTNQYGYMDSIPVNADVGLKSFASNNTAPYFNSDQGSNSFDCSDYGWGEQGSKTPEISSVLSATLEGDESQFVEDAVPTKKLKSDSGNAVFIENNTAKTLSEELSAFESQMNFQMPFLEGSWESNMEALFSGDTTQDGNSMDLWSFDDLPVMAGGVL

SEQ ID NO: 205 - DNA, 1379 bp, Capsicum annuum
acgcggggaaattaaactttctccattgaaattcactgcgaaaaaaaaaccctttcccagttataatacactacttaaattattagagaaaagaaaaagctatgtgtggtggtgcaattatctccgatttggtacctcctagccggatttcccgccggctaaccgccgagttgctatggggtaactctgatctgagcaaaaagaagaaaaatccagggaattattactcaaagcctttgaacaggtctaagtttattgaccttgatgaggaatttgaagctgactttcaggacttcaaggactatgccgatgacgatgttgatgatgttaagcccttcggttccaaatctgtgaaatctggcgattcaagctgcgatactgaaaaatcttccaagagaaagaggaagaatcagtaccgggggatcagacagcgtccttggggtaagtgggcagctgaaattcgtgatccgaggaaagggattcgagtttggcttggaactttcaattctgcggaagaagcagctagagcttatgatgttgaggcacgaaggatcagaggcaagaaggctaaggtgaactttcctgatggatctccagcttctgcttcaagacgtgctgttaagccaaatcctcaggaggcacttcgcgaggaaatcttgaacacagttcagccgaacacaacttatatcaacaacttggacggcggatctgatgattcgtttggctttttcgaagagaaaccagcagcaaagcagtatggctatgagaatgtttcttttactgctggagatatgggactgggttcaatttccccttcaactggtacaacaaatgtttacttcagttctgatgaaggaagcaacacctttgactgctctgatttcggttggggtgaaccatgtccgaggactccagagatctcatctgttctgtcagaagttctagaatgtaatggtactcaatctgatgaagatgctagaccagagaaaaaactgaagtcgtgttccaacgcttccttgccagatgaggataacactgtgcacacgctatctgaagagctatcggcttttgaatcccagatgaagttcttgcagatcccatatcttgagggaaattgggatgcatcagttgatgcctttgtcaacacaggcgcaattcaggatggcggaaatgcgatggatctctggaccttcgatgatgttccttctttaatgggaggtgtctactaagccaacacgcaccttcccttactaagttttgtaaataaagcttcatttgagtgaagtttgcagttatgttgtctccaaacaaaaaagactatatatgtgttgtattaaatttatttcataaatttacttgtttgatacaaaaaaaaaaaa

SEQ ID NO: 206 - protein, 375 aa, Capsicum annuum
MCGGAIISDLVPPSRISRRLTAELLWGNSDLSKKKKNPGNYYSKPLNRSKFIDLDEEFEADFQDFKDYADDDVDDVKPFGSKSVKSGDSSCDTEKSSKRKRKNQYRGIRQRPWGKWAAEIRDPRKGIRVWLGTFNSAEEAARAYDVEARRIRGKKAKVNFPDGSPASASRRAVKPNPQEALREEILNTVQPNTTYINNLDGGSDDSFGFFEEKPAAKQYGYENVSFTAGDMGLGSISPSTGTTNVYFSSDEGSNTFDCSDFGWGEPCPRTPEISSVLSEVLECNGTQSDEDARPEKKLKSCSNASLPDEDNTVHTLSEELSAFESQMKFLQIPYLEGNWDASVDAFVNTGAIQDGGNAMDLWTFDDVPSLMGGVY

SEQ ID NO: 207 - DNA, 1329 bp, Capsicum annuum
agttataatacactacttaaattattagagaaaagaaaaagctatgtgtggtggtgcaattatctccgatttggtacctcctagccggatttcccgccggctaaccgccgagttgctatggggtaactctgatctgagcaaaaagaagaaaaatccagggaattattactcaaagcctttgaacaggtctaagtttattgaccttgatgaggaatttgaagctgactttcaggacttcaaggactatgccgatgacgatgttgatgatgttaagcccttcggttccaaatctgtgaaatctggcgattcaagctgcgatactgaaaaatcttccaagagaaagaggaagaatcagtaccgggggatcagacagcgtccttggggtaagtgggcagctgaaattcgtgatccgaggaaagggattcgagtttggcttggaactttcaattctgcggaagaagcagctagagcttatgatgttgaggcacgaaggatcagaggcaagaaggctaaggtgaactttcctgatggatctccagcttctgcttcaagacgtgctgttaagccaaatcctcaggaggcacttcgcgaggaaatcttgaacacagttcagccgaacacaacttatatcaacaacttggacggcggatctgatgattcgtttggctttttcgaagagaaaccagcagcaaagcagtatggctatgagaatgtttcttttactgctggagatatgggactgggttcaatttccccttcaactggtacaacaaatgtttacttcagttctgatgaaggaagcaacacctttgactgctctgatttcggttggggtgaaccatgtccgaggactccagagatctcatctgttctgtcagaagttctagaatgtaatggtactcaatctgatgaagatgctagaccagagaaaaaactgaagtcgtgttccaacgcttccttgccagatgaggataacactgtgcacacgctatctgaagagctatcggcttttgaatcccagatgaagttcttgcagatcccatatcttgagggaaattgggatgcatcagttgatgcctttgtcaacacaggcgcaattcaggatggcggaaatgcgatggatctctggccttcgatgatgttccttctttaatgggaggtgtctataagccaacacgcaccttcccttattaagttttgtaaataaagcttcatttgagtgaagtttgcagttatgttgtctccaaacaaaaaagactatatatgtgttgtattaaatttatttcataaatttacttgtttgatgtaaaaaaaaaaaaaaaaaaaaaa

SEQ ID NO: 208 - protein, 369 aa, Capsicum annuum
MCGGAIISDLVPPSRISRRLTAELLWGNSDLSKKKKNPGNYYSKPLNRSKFIDLDEEFEADFQDFKDYADDDVDDVKPFGSKSVKSGDSSCDTEKSSKRKRKNQYRGIRQRPWGKWAAEIRDPRKGIRVWLGTFNSAEEAARAYDVEARRIRGKKAKVNFPDGSPASASRRAVKPNPQEALREEILNTVQPNTTYINNLDGGSDDSFGFFEEKPAAKQYGYENVSFTAGDMGLGSISPSTGTTNVYFSSDEGSNTFDCSDFGWGEPCPRTPEISSVLSEVLECNGTQSDEDARPEKKLKSCSNASLPDEDNTVHTLSEELSAFESQMKFLQIPYLEGNWDASVDAFVNTGAIQDGGNAMDLWPSMMFLL

SEQ ID NO: 209 - DNA, 1032 bp, Capsicum annuum
attctcaaaaataatttttcatttctgattcaatcttgttgtttctttcattttgaaaaaaaaaagaagaagaagaagagtactttaactacactgcaaaatgtgtggtggagcaattcttgctgatatcattcctcgtcgtgaccgtcgtctgtcatccacagacttatggtcaatttgttctgatgatttctggccaaattcttcattttccaagccattttccacccaaaatgtttcccctgcaaagcccaaacgaactcaaccctctgcaggtaatgagcaaatccagaaagccaagaaaaggcaaaggaagaatctatacaggggaatccgccagcgtccatggggtaaatgggcagctgaaattcgtgacccaagaaaaggggtcagagtctggttaggtactttcaacactgctgaagaagctgctagagcttatgacaaagaagctcgtaaaatccggggagagaaagctaaagttaatttcccaaatgaagatgatcactacagttatccagagcctcctcctctcgctgcttacaataatactactttttataataattgctatgcgttcgagaacaatgaacccgttatcgaatatgcaatagctaacaacaatgatcaaaatgggctgattaaagaggtggaaaatatgaatggaagggtcgtggaggaggaggaaaaaacagagattcaagtgcagaaactctctgaggaactgatggcttatgagtcattgatgaagttttatgagatcccttatgttgatgggcaatcagtggcggcgatggcgaatccagcggcggaggctgtcttgggtggtggcttgatggagctttggagttttgatgatgttagtcgtcaacaacctagttataatgtagtttgattattgtttgtttacattgttgtatgtttttatttttcggtttaggagaatgggtttccttgtaattctcaatgtttaagcaattggtaaaactattgtctctaaaaaaaaaaaaaaaaaaaaaaaaaaaaaaaaaa

SEQ ID NO: 210 - protein, 264 aa, Capsicum annuum
MCGGAILADIIPRRDRRLSSTDLWSICSDDFWPNSSFSKPFSTQNVSPAKPKRTQPSAGNEQIQKAKKRQRKNLYRGIRQRPWGKWAAEIRDPRKGVRVWLGTFNTAEEAARAYDKEARKIRGEKAKVNFPNEDDHYSYPEPPPLAAYNNTTFYNNCYAFENNEPVIEYAIANNNDQNGLIKEVENMNGRVVEEEEKTEIQVQKLSEELMAYESLMKFYEIPYVDGQSVAAMANPAAEAVLGGGLMELWSFDDVSRQQPSYNVV

SEQ ID NO: 211 - DNA, 1597 bp, Gossypium hirsutum
aaaaaaccaacccatttatttcactacccaacaacccaaaagataaaaggaatcgtttacttgttcgtagcaatttatcgtcatttcaagctcaattctctgaaaatttttgtgctgaacttcttttttctctttgtaccaccatgtgtggaggtgctattatctccgatttcataccgccgtcgcggtcgcgacgattgacggccgatttcttgtggcccgatctgaaaaaatccgggttgaagaaggggtcgggtaagagatactcgaagcccgtgatcgacttgggcgatgatttcgagactgactttcaggagttcaaagatgaagaatctgatatagatgattatgatgttgatgatgttttggctgatgtaaagccctttgcttttaacgctacaaagaaacctgcttctgctgtctctcatggttcgaactctgaaaaatccatgcaattcaatggtcaagctgagaaatgtgcgaaaagaaagaggaagaaccagtatcgtggaatccggcagcgcccatggggtaaatgggctgctgagatccgtgacccaaggaaaggggttagggtctggttaggaactttcaatactgctgaagaagctgcgagagcttatgatgctgaggcacggagaattcgtggtaagaaagctaaggtgaacttccctaacgagactccgcgtacctctccaaagcatgcagtcaagacaaattctcagaaaccactttccaagtcaaattcgagccctgttcagccaaatctcaaccagaattacaattacttgaaccagcctgagcaggaatactttgataccatgggtttcgtagaagagaagccatcggtcaatcagttcgcatacgtggaccctgttcctacgtctatagatgctggatttaatcaatcagataatgcccccttgtacttcaattcagaccagggaagtaactcgatcaattgttccgactatggctggggagaacagggtgccaaaactcctgaaatatcatccattctggaagcttctgtagagggtgatgagtttcttgaggatgctaaccctagcaagaagctgaaaccaagttccgacaatgttatgcctgccgaagacaactccgcgaagaccttgtcggacgagctgttggctttggacaaccagatgaaatacttccaaatgccgccatttattgaaggaaactgggacgccactattgatgctttcctcaatggagatgcaacacaggatggtggaaacccgatggatctttggaactttgatgatttccctaccatggcggagggtgttttctgagcgaactttccataataactagtgtttgtaaataaagcaacatgaatttggtcaaaatctgttgtgaagttgaagtaaaaaccaagctatatgcatgcttaagccttgcctgcactgctttcagaggtttttagtatgtaccccttttttatgtgtttttttgtagactttggactaaattttaaatttgagtgactgtataagtaactgtgtctgaatttgtctatgtttgaatactgaaaaacatatgaatgttttaaacccaaaaaaaaaaaaaaaaa

SEQ ID NO: 212 - protein, 390 aa, Gossypium hirsutum
MCGGAIISDFIPPSRSRRLTADFLWPDLKKSGLKKGSGKRYSKPVIDLGDDFETDFQEFKDEESDIDDYDVDDVLADVKPFAFNATKKPASAVSHGSNSEKSMQFNGQAEKCAKRKRKNQYRGIRQRPWGKWAAEIRDPRKGVRVWLGTFNTAEEAARAYDAEARRIRGKKAKVNFPNETPRTSPKHAVKTNSQKPLSKSNSSPVQPNLNQNYNYLNQPEQEYFDTMGFVEEKPSVNQFAYVDPVPTSIDAGFNQSDNAPLYFNSDQGSNSINCSDYGWGEQGAKTPEISSILEASVEGDEFLEDANPSKKLKPSSDNVMPAEDNSAKTLSDELLALDNQMKYFQMPPFIEGNWDATIDAFLNGDATQDGGNPMDLWNFDDFPTMAEGVF

SEQ ID NO: 213 - DNA, 1403 bp, Gossypium barbadense
ttgagaatcgatgcccggattaataatttctgggatgtagtcactaaaaaggcctttctcatgattttcttgcagttaaaggtcttaaattatatttccttgtgacagttatgttgtgatttgtagtttttcatggatgagtaatgtttatttatggttcatgtatccgtacgatattaaatttttctttttgtgctctatcattgaaggttcgaactctgaaaagtccatgcagttcgatggtcaagctgagaaatgtgcgaaaagaaagaggaagaaccagtatcgtggaatccggcagcgcccatggggtaaatgggctgctgagatccgtgacccaaggaaaggggttagggtctggttaggaactttcaatactgctgaagaagctgcgagagcttatgatgctgaggcacggagaattcgtggtaagaaagctaaggtgaacttccctaacgagactccgcgtacctctccaaagcatgcagtcaagacaaattctcagaaaccactttccaagtcgaatttgagccctgttcagctaaatctcgaccagaattacaattacttgagccagcctgagcaggaatacttcgataccatgggtttcgtagaagagaagccactggtcaatcagtttgcatatgtggaccctgttcctacgtctatagatgctggatctaatcaatcagataatgcccccttgtacttcaattcggaccagggaagtaactccatcaattgttccgactatggctggggagaacagggtgccagaactcctgaaatatcatccattcttgaagcttctgtagtgggtgaagagtttcttgaggatgctaaccctagcaagaagctgaaaccaagttctgacaatgttatgcctgccgaagacaactccgcgaagaccttgtcggacgagctgttggctttggacaaccagatgaaatacttccaaatgccgccatttattgaaggaaactgggacgccactattgatgctttcctcaatggagatgcaacacaggatggtggaaacccgatggatctttggaactttgatgatttccctaccatggcggagggtgttttctgagcgaactttccataataactagtgtttgtaaataaagcaacatgaatttggtcaaaatctgttgtgaagttgaagtaaaaaccaagctatatgcatgcttaagccttgcctgcactgctttcagaggtttttagtatgtaccccttttttatgtgtttttttgtagactttggactaaattttaaatttgagtgactgtataagtaattgtgtctgaatttgtttatgtttgaatactgaaaaacatatgaatgttttaaactctgctatttgtttctcccaaaaaaaaaaaaaaaaaaaaaaaaaa

SEQ ID NO: 214 - protein, 319 aa, Gossypium barbadense
MSNVYLWFMYPYDIKFFFLCSIIEGSNSEKSMQFDGQAEKCAKRKRKNQYRGIRQRPWGKWAAEIRDPRKGVRVWLGTFNTAEEAARAYDAEARRIRGKKAKVNFPNETPRTSPKHAVKTNSQKPLSKSNLSPVQLNLDQNYNYLSQPEQEYFDTMGFVEEKPLVNQFAYVDPVPTSIDAGSNQSDNAPLYFNSDQGSNSINCSDYGWGEQGARTPEISSILEASVVGEEFLEDANPSKKLKPSSDNVMPAEDNSAKTLSDELLALDNQMKYFQMPPFIEGNWDATIDAFLNGDATQDGGNPMDLWNFDDFPTMAEGVF

SEQ ID NO: 215 - DNA, 1538 bp, Gossypium hirsutum
cggcacgaggagagagagagaactagtctcgtgccgggaaaatttacaattaaaaaaattaattttgccctctaaatttctctaaaaaatctcctaaatcccatactttaaatccaattcgccatgtgtggaggtgcgattatctccgatttcattccgcctgcgcggtcgcgactggtgacggcgaattatttgtggccggatctgaaaaaatccggctctaaaaagcggtcgggtagaaagcactcgaagaagccggcggtcggctttgaagatgacttcgaggctgattttcaggtgtttaaggatgaggattctgatgtcgatgacttcaacgatgatgttgatgatgttttggctgatgttaagtcctttgctttttctgctacaaagaaaccctctcctgctgtttctcatggttcaaactccataaaatctgtggaattcagtggtcaagctgagaaatctgcaaaaagaaagaggaagaaccagtatcgcggaattcgccagcgtccgtggggtaaatgggctgctgagatccgtgatcctaggaaaggggttagggtgtggcttggaacttttaatactgctgaggaagctgcacgagcttatgatgctgaggcactgagaattcggggtaagaaagcaaaggtgaacttccctgatgagactccacgtaccactccaaagcatgctgttaaaatgaattctcagaaacctctttccgggtcaaatttgagttctgttcaatcaagtctcaacccagatttcagttactcgaacaaacttgagcagggctactatgataccgtgggtttcattgaagagaagtcactaatggatcagtttgcatatgcagaccctgttagagctgctgtagatgatgggttaaaaccctttgctgaccctgagaataccgcttcgttttttatctcagatccagggagtaacaactttgacagttccgaccttgtctggggcgaccagggtgccaagactcctgaaatatcatcctctcttgaacctactctagaggtcaacgagtttctggacaacgcaaaccctacgaagaagttgaaactgagcttgaataatgtcatgcctactggaggagacaattcggtaaagagtttatccgatgagctattagctatggacaatcaagtgaactactttcagacaccatttattgacgagaactggaatgtttcgatggatgacttccttaatggagatgcaactcaggttggcggaaacgaaatgggtttttggagctttgatgactttccttccatagatgggggtattttctgaacaaactctccttacttattatccgtttccgtacataaggcatcgtgttagcgagtttcgaccctctggcaactgcttgactattgtttctatcttgatatctctaacaccgaaaaattcaaatttaaatttcgagtgactgttagaacttacaacattgattatgtgtgatttatgatgaaaatttgaaactcctatgaatgtttaaccaaaaaaaaaaaaaa

SEQ ID NO: 216 - protein, 396 aa, Gossypium hirsutum
MCGGAIISDFIPPARSRLVTANYLWPDLKKSGSKKRSGRKHSKKPAVGFEDDFEADFQVFKDEDSDVDDFNDDVDDVLADVKSFAFSATKKPSPAVSHGSNSIKSVEFSGQAEKSAKRKRKNQYRGIRQRPWGKWAAEIRDPRKGVRVWLGTFNTAEEAARAYDAEALRIRGKKAKVNFPDETPRTTPKHAVKMNSQKPLSGSNLSSVQSSLNPDFSYSNKLEQGYYDTVGFIEEKSLMDQFAYADPVRAAVDDGLKPFADPENTASFFISDPGSNNFDSSDLVWGDQGAKTPEISSSLEPTLEVNEFLDNANPTKKLKLSLNNVMPTGGDNSVKSLSDELLAMDNQVNYFQTPFIDENWNVSMDDFLNGDATQVGGNEMGFWSFDDFPSIDGGIF

SEQ ID NO: 217 - DNA, 995 bp, Gossypium hirsutum
  misc_feature (919)..(919): n is a, c, g, or t
atgtgtggaggtgcaattatttccgatttcgtcgccgtgaaacatgacccgaaattgaccggcgatgacctttggtctgaaattgacatattctccgacctcctaggtttcgacaacaatggcaaaagctttgtcaatcatcagtttcataacaacaacaagaagctgatcaatccaaaagacaatcaacttaacaaagagagaagcgagacgattcagaagacaagccgagtcactaaaaatgttgaaaagactcagcgaactcggaaaaacttttaccgaggaataagacaaaggccatggggcaaatgggcagctgagattagagaccctcaaaaaggcgtccgagtttggctcggtacccataacacagccgaagaagcggctcgagcctacgatgaagccgccaagcgtatccgtggtgataaagccaagctcaacttccctcaaacgcccaccaaaaatcaagcagcttcaccagctcttactcagcttcctcctgctaagaaaaggtgcatcgttcccgagttaactcaaccgagcttccagactgactcaccaccttatcctatgggtcttgggtctggaagaagtgaagattataagccgattgaagtggtggagagtgagttggagttgaaagaacaaatctggagcctggaatcatttctgggtttggagactaatcatgagactatgactcaactgagtggtaacggagggactgactcactggagctttggacacttgatgacctcgtaactcagtataagcaacggcgctaacatgttcatcagtgggggcgaaaattaaataatagttagcgttaataaatgttttttgtgttaattagggtttttttatttatactatcatgcattatatatatatatagatgagaataaaggattaacgctntgctcttgcatggattagttagcgttaatcaatgttagtgtgtaattagggtttttattatgttaaaaaaaaaaaa

SEQ ID NO: 218 - protein, 261 aa, Gossypium hirsutum
MCGGAIISDFVAVKHDPKLTGDDLWSEIDIFSDLLGFDNNGKSFVNHQFHNNNKKLINPKDNQLNKERSETIQKTSRVTKNVEKTQRTRKNFYRGIRQRPWGKWAAEIRDPQKGVRVWLGTHNTAEEAARAYDEAAKRIRGDKAKLNFPQTPTKNQAASPALTQLPPAKKRCIVPELTQPSFQTDSPPYPMGLGSGRSEDYKPIEVVESELELKEQIWSLESFLGLETNHETMTQLSGNGGTDSLELWTLDDLVTQYKQRR

SEQ ID NO: 219 - DNA, 1042 bp, Gossypium hirsutum
atgtgtggaggtgcaattatttccgatttcattgccgtgaaacgcggtcggaagttaaccgccgaggatctttggtctgaacttgacacattctccgacctgttgggtctggattacggaaatggaaaagagtcttctttcactcagtccgacaacaccaaggccggttccaaagccaagaaccttgaaaaagtggcaaacgagacgactcagaagacaagccgagggagagagaaagaagggaagactcagcgaactcgaaagaacatttacagaggaatcaggcaaaggccatgggggaaatgggcggctgagataagagatcctcacaaaggtgtccgagtctggctcggtacatacaacacggctgaagaagcggctcgagcctacgatgaagccgccaagcgcatccgtggggagaaagccaagctcaacttccctcaaactccacacctaactcagcctcctgctaagaaaaggtgtatgatggctcctgagttgactccgccgagttctgaaacaaagagcccaccaaccccacaactttttatgggttttggttacgagaatggagtttacagaccgagtgaagcaatggaaagcgagatggagctgaaggagcaaatctcgagcctggagtcgttcctgggtttggagcctgatgagacaacaactgagttgagtggaagtgctgagcctgactcagtggacctttggatgcttgatgaccttgtgacacatcatcaacaacagcctcagctcttttattagaaattaaaaagttttaattagggtaatgttatgtttgatatgattatgcttaagactttaatgtttgtattaatgaagggtaaatagttgtgacaataaaaagattggccacccagttttaatttatatttatttctaatttgggtgacatgtaaattggtttcgagaaacattgaagtacccataatgttagttcatgtatcagatatagtaaacactttggattaataaaaaaacctcctaatattttatttgtaaaaaaaaaaaaaaa

SEQ ID NO: 220 - protein, 256 aa, Gossypium hirsutum
MCGGAIISDFIAVKRGRKLTAEDLWSELDTFSDLLGLDYGNGKESSFTQSDNTKAGSKAKNLEKVANETTQKTSRGREKEGKTQRTRKNIYRGIRQRPWGKWAAEIRDPHKGVRVWLGTYNTAEEAARAYDEAAKRIRGEKAKLNFPQTPHLTQPPAKKRCMMAPELTPPSSETKSPPTPQLFMGFGYENGVYRPSEAMESEMELKEQISSLESFLGLEPDETTTELSGSAEPDSVDLWMLDDLVTHHQQQPQLFY

SEQ ID NO: 221 - DNA, 1143 bp, Gossypium barbadense
ccatctgaaaaaaaaacaggttttcttttaagataacacccaaaaatgtgtggaggtgcaattatttccgatttcgtcgcccccaaatatgaccggaaattgaccggcgatgacctttggtctgaacttgacatattctccgacctcctaggtttcgacaacaatggcaaaagctttgtcaatcatcagtttcataacaacaacaacaacaagctcattaatccaaaagacaatcaacttaacaaagagagaagcgagacgattcagaagacaagccaagtcactaaaaaggttgaaaagactcagcgaactcggaaaaacttttacagaggaataagacaaagaccatggggcaaatgggcagctgagattagagaccctcaaaaaggcgttcgagtttggctcggtacctataacacagccgaagaagcgactcgagcctacgatgaagcagccaagcgtatccgtggtgataaagccaagctcaacttccctcaaacgcccaccaaaaatcaagcagcttcaccagctcttactctgcttcctcctgctaagaaaaggtgcatcgttcccggagttaactcaaccgagtttaccagactggactcaccacctatatccctatgggttcttggggtatgagaagaagtgaaagattataagccgattgaagtggtggagagtgagttggagttgaaagaacaaatctggagccttggaatcatccctgggtttggagactaaccatgagactatgactcagctgagtggtaacggtgggactgacccactggagctttggacacttgatgaccccgtaacccagtataagcaacggcgctaacatgttcattagtgggggcgaaaattaaataatagttagcattaatcaatgtttttgtgttacttagggtttttttatttatgctatcatgcattatatatatatatgagaataaaggattaacgctttgctcttgcatggattagttagcgttaatcaatatttgtgtttagggttttttattatgttgttatatatgtatatgcttatgactttcatgtttgtatcaatgcattagttgcattatatatataagaataaaggatttaacaaaaaaaaaaaaataaaaaaaaaaaaaa

SEQ ID NO: 222 - protein, 198 aa, Gossypium barbadense
MCGGAIISDFVAPKYDRKLTGDDLWSELDIFSDLLGFDNNGKSFVNHQFHNNNNNKLINPKDNQLNKERSETIQKTSQVTKKVEKTQRTRKNFYRGIRQRPWGKWAAEIRDPQKGVRVWLGTYNTAEEATRAYDEAAKRIRGDKAKLNFPQTPTKNQAASPALTLLPPAKKRCIVPGVNSTEFTRLDSPPISLWVLGV

SEQ ID NO: 223 - DNA, 1079 bp, Gossypium hirsutum
gcacgaggatctaagaacccgaaaagtagagctttggttctctgtctgctgcttctttcttctcttggtacttcattatttttcctttcacttcctttttgtgaaaaaacattgaaacccttttcaagacgcaatagaagatgtgtggaggtgcaatcatttccgatttcattgccgtgaaacgcggtcggaagttaaccgccgaggatctttggtctgaacttgacacattctccgacctgttgggtctggattacggaaatggaaaagaccctttcactcagttcgacaacaccaaggccggttccaaagccaagaaccttgaaaaagtgacaaacgagtcgactcagaagacaagccgggggagagagaaagaagggaagactcagcgaactcgaaagaacatttacagaggaatcaggcgaaggccatgggggaaatgggcggctgagataagagatcctcacaaaggtgtccgaatctggctcggtacatacaacacggctgaagaagcggctcgagcctacgatgaagccgccaagcgcatccgcggggacaaagccaagctcaacttccctcaaactccacgcctaactcagcctcctgctaagaaaaggtgtatgatggctcctgagttgactccaccgagttctgaaaccaagagcccaccaaccccacaaccttttatgggttttggttacgagaatggagtttacaggccgagtgaagcaatggaaagcgagatggagctgaaggagcaaatctcgagtctggagtccttcctgggtttggagcctgatgagatgacaactgagttgagtggaagcgctgagcctgagtcagtgaacctttggatgcttgatcaccttgtgacacatcatcaacaacagcctcagctcttttattagaaattaaaaagtttaaattagggtaatgttatgtttgatatgattatgcttaagactttaatgtttgtattaatgaagggtaaatagttgtgacaataaaaagattggccacccagttttaatttatatttatttcctaaaattctaaaaaaaaaaaaaaaaaaaaaaaaa

SEQ ID NO: 224 - protein, 255 aa, Gossypium hirsutum
MCGGAIISDFIAVKRGRKLTAEDLWSELDTFSDLLGLDYGNGKDPFTQFDNTKAGSKAKNLEKVTNESTQKTSRGREKEGKTQRTRKNIYRGIRRRPWGKWAAEIRDPHKGVRIWLGTYNTAEEAARAYDEAAKRIRGDKAKLNFPQTPRLTQPPAKKRCMMAPELTPPSSETKSPPTPQPFMGFGYENGVYRPSEAMESEMELKEQISSLESFLGLEPDEMTTELSGSAEPESVNLWMLDHLVTHHQQQPQLFY

SEQ ID NO: 225 - DNA, 916 bp, Gossypium hirsutum
atgagactatgcggccgctgttacaagtcgacgaatcaacttaacaaagggagaagcgagacgattcagaagacaagccgagtcactaaaaatgttgaaaagactcagcgaactcggaaaaacttttaccgaggaataagacaaaggccatggggcaaatgggcagctgagattagagaccctcaaaaaggcgtccgagtttggctcggtacccataacacagccgaagaagcggctcgagcctacgatgaagccgccaagcgtatccgtggtgataaagccaagctcaacttccctcaaacgcccaccaaaaatcaagcagcttcaccagctcttattcagcttcctcctgctaagaaaaggtgcatcgttcccgagttaactcaaccgagtttccagactgactcaccaccttatcctatgggtcttgggtctggaagaagtgaagattataagccgattgaagtggtggagagtgagttggagttgaaagaacaaatctggagcctggagtcgttcctgggtttggagcctgatgagacaacaactgagttgagtggaagtgctgagcctgactcagtggacctttggatgcttgatgaccttgtgacacatcatcaacaacagcctcagctcttttattagaaattaaaaagttttaattagggtaatgttatgtttgatatgattatgcttaagactttaatgtttgtattaatgaagggtaaatagttgtgacaataaaaagattggccacccagttttaatttatatttatttctaatttgggtgacatgtaaattggtttcgagaaacattgaagtacccataatgttagttcatgtatcagatatagtaaacactttggattaataaaaaaacctcctaatattttatttgtaaaaaaaaaaaaaaa

SEQ ID NO: 226 - protein, 214 aa, Gossypium hirsutum
MRLCGRCYKSTNQLNKGRSETIQKTSRVTKNVEKTQRTRKNFYRGIRQRPWGKWAAEIRDPQKGVRVWLGTHNTAEEAARAYDEAAKRIRGDKAKLNFPQTPTKNQAASPALIQLPPAKKRCIVPELTQPSFQTDSPPYPMGLGSGRSEDYKPIEVVESELELKEQIWSLESFLGLEPDETTTELSGSAEPDSVDLWMLDDLVTHHQQQPQLFY

SEQ ID NO: 227 - DNA, 1190 bp, Gossypium hirsutum
ataaccgtcggtctataaatcctagaccccaataccaaagctttttccatctgaaaaaaaaacaggttttcttttaagataacacccaaaaatgtgtggaggtgcaattatttccgatttcgtcgcccccaaatatgaccggaaattgaccggcgatgacctttggtctgaacttgacatattctccgacctcctaggtttcgacaacaatggcaaaagctttgtcaatcatcagtttcataacaacaacaacaacaagctcattaatccaaaagacaatcaacttaacaaagagagaagcgagacgattcagaagacaagccaagtcactaaaaaggttgaaaagactcagcgaactcggaaaaacttttacagaggaataagacaaagaccatggggcaaatgggcagctgagattagagaccctcaaaaaggcgtccgagtttggctcggtacctataacacagccgaagaagcggctcgagcctactatgaagccgccaagcgtatccgtggtgataaagccaagctcaacttccctcaaacgcccaccaaaaatcaagcagcttcaccagctcttactcagcttcctcctgctaagaaaaggtgcatcgttcccgagttaactcaaccgagtttccagactgactcaccaccttatcctatgggtcttgggtatggaagaagtgaagattataagccgattgaagtggtggagagtgagttggagttgaaagaacaaatctggagcctggaatcattcctgggtttggagactaaccatgagactatgactcagctgagtggtaacggtgggactgactcactggagctttggacacttgatgacctcgtaactcagtataagcaacggcgctaacatgttcattagtgggggcgaaaattaaataatagttagcgttaatcaatgtttttgtgttacttagggtttttttatttatgctatcatgcattatatatatatatatgagaataaaggattaacgctttgctcttgcatggattagttagcgttaatcaatatttgtgtgttaattagggttttttattatgttgttatatatgtatatgcttaaggactttcatgtttgtatcaatgcattagttgcattatatatattaagaataaagggattttacacgttgcagtttgaaaaaaaaaaaaaaaa

SEQ ID NO: 228 - protein, 262 aa, Gossypium hirsutum
MCGGAIISDFVAPKYDRKLTGDDLWSELDIFSDLLGFDNNGKSFVNHQFHNNNNNKLINPKDNQLNKERSETIQKTSQVTKKVEKTQRTRKNFYRGIRQRPWGKWAAEIRDPQKGVRVWLGTYNTAEEAARAYYEAAKRIRGDKAKLNFPQTPTKNQAASPALTQLPPAKKRCIVPELTQPSFQTDSPPYPMGLGYGRSEDYKPIEVVESELELKEQIWSLESFLGLETNHETMTQLSGNGGTDSLELWTLDDLVTQYKQRR

SEQ ID NO: 229 - DNA, 1460 bp, Manihot esculenta
ctgcagcgacaaccaccatgtgtggcggtgctatcatctccgacttcatccctgccaccgctgctggccgatcctcgcgacggttgacagcggactttctctggcctgatctaaagaagcccattgggaaaatcgttggtgaccttgacgatgatttcgaggctgatttccaggagtttaaggatgagtctgatgtcgatgaggaagatgacgttttgtttgatgtcaagcctttctctttctctgctactgcttctcctcctcctcgcaatcgcagtccttcacgtggttctacagctgtaaagtctgtggaatttaatgggctagctgaaaaatctgcaaagagaaagagaaaaaaccagtacagaggaatccggcagcgcccatggggaaaatgggctgctgagattcgtgaccccaggaaaggggtgcgtgtctggctaggaacattcaatactgctgaagaagctgcaagagcgtatgatgctgaggcacgtagaattcgtggcaagaaagctaaagtgaactttcctgatgaagctccacgtgcttccccaaagcggacaatgaaggcaaaccctcagaaaccacttcctaagagaaatgctactgagagtatgagttacttgaacaatccagatcaggactacttcaatactttgggctctgttgatgagaaaccactagtgagccagtttgatttgatggactcttttcctgccaatggagatgctacagtcaaatctattcctccatgtgataatgttcccacgtttttcaattctgatcagggaagcaactcatttgaatgttccgactttggatggggggagcaggcctcaaagactcctgaaatctcatctgttctttcagctactccagaaattgatgaatcacttttcatggatgatgctaaccctaaaaagaagatgaagtctgactctgaaaatgcagttcctatagaagaaagcaatggaaaatctctatcagaggagttgttggcttttgacaaccagatgaactttcagatgccttatcttgagggaagttgggaggcttcacttgatggcttccttaatggagacgtgactcaggatggtggaaatccaatggacctgtggagctttgatgacctccctaatatggttgggggagtttattgagcaaaatcataattgccggttggcttctgtaaataaggctacatggatggttttctctctgaaatgtattacaagcacatctgaacatgcttaatcctttgaggagagtgtcctagggagcttttggtacaagagttgtagtaaataggaatatttagtttcccttttacattttgagacactggacttgggttgttcaatttaataactgtaattgacaatgtgcgtgtgatttgtgtttaaaactgatataaattttatctctactgttgtttttaaaaaaaaaaaaaaaaaaaa

SEQ ID NO: 230 - protein, 381 aa, Manihot esculenta
MCGGAIISDFIPATAAGRSSRRLTADFLWPDLKKPIGKIVGDLDDDFEADFQEFKDESDVDEEDDVLFDVKPFSFSATASPPPRNRSPSRGSTAVKSVEFNGLAEKSAKRKRKNQYRGIRQRPWGKWAAEIRDPRKGVRVWLGTFNTAEEAARAYDAEARRIRGKKAKVNFPDEAPRASPKRTMKANPQKPLPKRNATESMSYLNNPDQDYFNTLGSVDEKPLVSQFDLMDSFPANGDATVKSIPPCDNVPTFFNSDQGSNSFECSDFGWGEQASKTPEISSVLSATPEIDESLFMDDANPKKKMKSDSENAVPIEESNGKSLSEELLAFDNQMNFQMPYLEGSWEASLDGFLNGDVTQDGGNPMDLWSFDDLPNMVGGVY

SEQ ID NO: 231 - DNA, 1409 bp, Populus alba x Populus tremula
ataatcaccatcaatcaacatgtgtggcggtgctatcatctcaggcttcatcgctccgacaaccaccgctcgatcttctcggcggttgacctcgggctttgagtggcttgagccgaagaaacccttcaacaacaagcacttgaagccagttgttgctgatcccgaagatgattttgaggctgatcttcaagagtttaaggacgagtctgatgtcgacgaggattatgatgtctttgctgatgccaagccttttgctttctctgccagtgcttctgaacctgctaaaaaacgtgggctccctcgtggttctactgctgttaaatctgctggattcagtggacttgctaaaaactcagcaaagaggaagagaaagaaccagtttagaggaattaggcagcgtccatggggaaaatgggctgctgagattcgtgatcccaggaaaggggtacgtgtctggttgggaacattcaatactgcagaagaagctgctagagcatatgattctgaggcacgtagaattcgtggcaagaaagcgaaggtgaacttccctgatgaagctccatgtgcttcagcaaggcatccaattaaggaaaactcacagaaacgacttacaaaggcaaatttaagccaggattttagttacttgagcaacccagaaacggattataataatatgggctttgtggaagagaaaccacaagtgagccagtttggaataatgaattctatcccggtcaatggagattctggggtgacgcccttaactccttctgacaatgcttctatgtatttcaattctgacaaggggagcaactcatttgattgtgactttgggtggggagaacaaggcgctgaaatcttgtctgttcttgcagcaactccagaagttgatgaatccgtctttgtggaagctaatcctaagaagttgaaatcatacactgagtatgcagtgcctgttgaagagaggaatggaaaatctctgtccgaagagttgctggcttttgacaatcagttgatgaaccttcagatgccagatcttgtgggtaactgggaggcttctcttgatagcttccttaatggagacacaactcaggatggcacaaacgcagtggacttgtggagcttcgaagacttcccctccatggttgggggagtttattgagccaacttttctgtgcttgccaggttttgtaaataataaggctacatgaatggttgtttatctgagatgggaatggagtgcaacacagatgaacatgcttagccttggtgtgggagaagcattctcaggagcattttccatataaaagtagtacatcggtttcccgtttcattacatttggagtcactggactttggaagttggattcgatgactgtaatttgacaatgtggtgtgacttatttaga

SEQ ID NO: 232 - protein, 380 aa, Populus alba x Populus tremula
MCGGAIISGFIAPTTTARSSRRLTSGFEWLEPKKPFNNKHLKPVVADPEDDFEADLQEFKDESDVDEDYDVFADAKPFAFSASASEPAKKRGLPRGSTAVKSAGFSGLAKNSAKRKRKNQFRGIRQRPWGKWAAEIRDPRKGVRVWLGTFNTAEEAARAYDSEARRIRGKKAKVNFPDEAPCASARHPIKENSQKRLTKANLSQDFSYLSNPETDYNNMGFVEEKPQVSQFGIMNSIPVNGDSGVTPLTPSDNASMYFNSDKGSNSFDCDFGWGEQGAEILSVLAATPEVDESVFVEANPKKLKSYTEYAVPVEERNGKSLSEELLAFDNQLMNLQMPDLVGNWEASLDSFLNGDTTQDGTNAVDLWSFEDFPSMVGGVY

SEQ ID NO: 233 - DNA, 1523 bp, Trifolium pratense
gaatcaatcaacaaaacaaaacccagtaaaaatttcaatcctttttaacaaaatcttcaattgggtataagaaagtttcaatctttttcttgttaagataaagacaaagatctgacaaaaacagaaagatgtgtggtggtgctattatttccgacttcattccagctgcggcggcggtgggtggttcccgccgtgtcactgctgatatcttgtggccaaatttgaggaaaactggttccaaaaaatcatcttttttgcttgacgatgattttgaagctggtttcagacagtttaaggatgattctgatttcgatgaagacgaggatgaagatgacgatgaagggttgttggtcggtgtcaaaggttttacctttgctgcttctaacaacaaatcttcaaggaacttctctcgtggctcggctggtgcaaaatccgtggcatcgaaatcaaatgagcaagctgaaaaggaatcaaagagaaagaggaagaatcagtataggggtatccgccaacgtccatggggaaaatgggcagctgagatccgtgatccaaggaaaggagtccgtgtttggctcggaactttcaacactgctgaagaagctgcaagagcttacgatgctgaagctaggagaatccgtggcaagaaagccaaggtgaatttccccgatgaggctccaaatgcttcctcaaaacgtctgaagacaaatcctgataaccagctgttgaacaaaaatctgaactctttcaagccgaacggaaacaacaaaatgttcaatttcagcgagaatatggagaacttctattctcctatggatcaggttgaacagaaaccattggttaacaaccaatatggtgctgctgacattggagccttcactggaaacggagttcaccttgcacctgctgatgttaatgcttatttcagttctgagcattcaagcaactcgtttgattattctgatttatgttggggggaacaaggcccgaaaacccctgagatttcctcggtgttttctgctcctctcgaagctgaacctcagatgaacatgcagtctaacaactctcaggatatgctacctatgcaagctgaatctgcaaagacactctctgaggagcttgcagatatcgaatcccagctgaagttcttcgagaactcattcgatgataactggagtgatgcttcacttgcgtctttgctcggtgctgatgtaactcaggatgctggaaacacaatgaacctttggagctttgatgacctgccttccatcgcaggcggagttttctgaacaactttcgcctcaccggttatgtaaataaagctacaagttagtaactttcagtttacattcggtttggttcattttgtttttacaaggtggataattaaattgttttgttttcaggattgttggtttatttttatattgttgatggaatcagaaacaagaacaagttaccagctttaattaagcgtggagttttattctcttgtggcaaaaataaattatttataggtttttatt

SEQ ID NO: 234 - protein, 385 aa, Trifolium pratense
MCGGAIISDFIPAAAAVGGSRRVTADILWPNLRKTGSKKSSFLLDDDFEAGFRQFKDDSDFDEDEDEDDDEGLLVGVKGFTFAASNNKSSRNFSRGSAGAKSVASKSNEQAEKESKRKRKNQYRGIRQRPWGKWAAEIRDPRKGVRVWLGTFNTAEEAARAYDAEARRIRGKKAKVNFPDEAPNASSKRLKTNPDNQLLNKNLNSFKPNGNNKMFNFSENMENFYSPMDQVEQKPLVNNQYGAADIGAFTGNGVHLAPADVNAYFSSEHSSNSFDYSDLCWGEQGPKTPEISSVFSAPLEAEPQMNMQSNNSQDMLPMQAESAKTLSEELADIESQLKFFENSFDDNWSDASLASLLGADVTQDAGNTMNLWSFDDLPSIAGGVF

SEQ ID NO: 235 - DNA, 1539 bp, Glycine max
attgagccaaagctttgtattttctgcgataattttccattgggtggaagaaagtctcaacctttattcgaaagagcaaggatctgagttgagttgagtgatcatgtgtggtggtgcgattatctccgacttcataccggcaggtcccgccagcggggcgcggcgcgtgaccgccgacatcctgtggccgagtttgaggaagcgcttctcgaagccgctgctggacgatgatttcgaggctgggttcagagaattcaaggatgattcggaaatcgaggatgttgatgacgaggacgatgaagacgaggaggagttgaagaagaagccctttgggttctctcgctccagcaacaaggctgcttctaagcctctctctcgtggagcaacaactgtgaaatctgtggaatcaaaggggcaagctgagaagtgtgccaagagaaagaggaagaaccagtatcgcggaatccgccagcgtccatggggaaagtgggctgctgagattcgcgacccaagaaagggggttcgtgtttggcttggaactttcagcactgctgaagaagctgcaagagcttacgatgctgaagcaaggaggatccgtggcaagaaagccaaggtgaatttccctgatgagccttcaggcgctgcttcctcaaaacgtctcaaggcgaatccagaggctcagccaatgaagaaaaatctgaactctgtgaagccgaaaataaaccagatgttcaattttggtgacaatcttgagggctactacagccctatagatcaggtggaacagaaaccactggttaaccagtatgttaaccgtgccccgtttgctggaaatggagttcaagtctcacctgttactccatctgctgatgttactgcttacttcagctctgagcattcgagcaactcgtttgattattctgaccttggatggggtgaacaagtccccaagacccccgagatctcatccttgctttctgctgctcctttggagggtgctgctgatcaggttcagaagaccaacaactcgcaggatgtggtggctgcacaagatgattctgcaaaaaccctttccgaagagcttgcagacattgaatcccagctcaagttctttgagaccccttcttttcttgatgaagcctgggctgatgctacattggcgtctttgctcggcggagacgcaactcatgacgccgccggaaaccctatgaacctttggagcttcgacgacctgccttccatggcaggagtcttctgaacaccctttatctccccttttatgtaaataaagctacaagaattgtgatcgtgatgttggtgatggagtccacagccaagaaacctgcttaaagcttatgtggagtttattttatcttgtagctaatgcagtagtataggactatatataggtttttattatagggtatccttttgtgaactcaaagacctcgttttcaggggattttctgtttgatgtccttaaggattatcaattatgttatatatggtcttggataaaaataaaaaaaaaaaaaaaaa

SEQ ID NO: 236 - protein, 384 aa, Glycine max
MCGGAIISDFIPAGPASGARRVTADILWPSLRKRFSKPLLDDDFEAGFREFKDDSEIEDVDDEDDEDEEELKKKPFGFSRSSNKAASKPLSRGATTVKSVESKGQAEKCAKRKRKNQYRGIRQRPWGKWAAEIRDPRKGVRVWLGTFSTAEEAARAYDAEARRIRGKKAKVNFPDEPSGAASSKRLKANPEAQPMKKNLNSVKPKINQMFNFGDNLEGYYSPIDQVEQKPLVNQYVNRAPFAGNGVQVSPVTPSADVTAYFSSEHSSNSFDYSDLGWGEQVPKTPEISSLLSAAPLEGAADQVQKTNNSQDVVAAQDDSAKTLSEELADIESQLKFFETPSFLDEAWADATLASLLGGDATHDAAGNPMNLWSFDDLPSMAGVF

SEQ ID NO: 237 - DNA, 458 bp, Narcissus pseudonarcissus
atgtgtggaggagcaataatctctgatttcatacctccatcaaggtcaaggaagctcactgccgattacttgtggcccaatctcaacaaggggaaggacaagaagaagagctttgggtttgaagatgactttgaagctgacttcaatgagtttgaagatgagtctgaggagggggaatctgaagctgttgatgtcaaaccctttaagtttggggctaaagctggcttttctagagagggatcgacttatctgaaacccatcgaactcaatggagctgctgaacgatcatccaaaaggaagaggaagaaccaatacagaggtatccgtcagcgtccatggggtaaatgggcagctgagataagagatcctaacaaaggagttcgtgtttggctgggaacttttaacacagctgaagaagctgcgagagcctatgatgatgaagcccgtaggatccgtgg

SEQ ID NO: 238 - protein, 153 aa, Narcissus pseudonarcissus
MCGGAIISDFIPPSRSRKLTADYLWPNLNKGKDKKKSFGFEDDFEADFNEFEDESEEGESEAVDVKPFKFGAKAGFSREGSTYLKPIELNGAAERSSKRKRKNQYRGIRQRPWGKWAAEIRDPNKGVRVWLGTFNTAEEAARAYDDEARRIRG

SEQ ID NO: 239 - DNA, 823 bp, Arabidopsis thaliana
agtaatttagcagcaacaaacagagaaaatgtgtggcggtgctattatttccgattatgcccctctcgtcaccaaggccaagggccgtaagctcacggctgaggaactctggtcagagctcgatgcttccgccgccgacgacttctggggtttctattccacctccaaactccatcccaccaaccaagttaacgtgaaagaggaggaggcggtgaagaaggagcaggcaacagagccggggaaacggaggaagaggaagaatgtttatagagggatacgtaagcgtccatggggaaaatgggcggcggagattcgagatccacgaaaaggtgtcagagtttggcttggtacgttcaacacggcggaggaagctgccatggcttatgatgtagcggcgaagcagatccgtggtgagaaagccaagctcaacttcccagatctggatcatcatccttctactcctccgccatcgtctacttcactaagattatccgatcagccaccggcgaagaaggtttgcgttgtctctcagagcgagttagctcagccgagtttcccggtggagtgtgttggatttggaaagggggaagagtttcagaacctgatgtacggatttgaaccggattatgatttgaaacagcagatatcgagcttggagtcgttccttgagcttgacggtaccacggcggagcaaccgagtcaactagatgagtctgtttgcgatgtggatatgtggatgcttgatgatgtcattgcgtcgtatgagtaaaaggaaaaaaaaacagaagataatgtaatatgtaaaaaaaaaaactaaattact

SEQ ID NO: 240 - protein, 246 aa, Arabidopsis thaliana
MCGGAIISDYAPLVTKAKGRKLTAEELWSELDASAADDFWGFYSTSKLHPTNQVNVKEEEAVKKEQATEPGKRRKRKNVYRGIRKRPWGKWAAEIRDPRKGVRVWLGTFNTAEEAAMAYDVAAKQIRGEKAKLNFPDLDHHPSTPPPSSTSLRLSDQPPAKKVCVVSQSELAQPSFPVECVGFGKGEEFQNLMYGFEPDYDLKQQISSLESFLELDGTTAEQPSQLDESVCDVDMWMLDDVIASYE

SEQ ID NO: 241 - DNA, 918 bp, Medicago truncatula
atgtgtggtggtgctatcatcgctgacttcattcctcgccgtgacggccgccgtctcaccgcctcggagctctggcctaactcatttggccaacagattgactcctcaaacttcggtttttctcatactgctgctgatcaacaaccacccagcactctcaaaagatcacagcctcccaaagttaatgaacgagttgagaagccactgaaaaaacagaggaagaatctctatagaggaattcgacagcgtccatggggaaaatgggctgcagagattcgtgatccaagaaaaggagttcgtgtttggcttggtacattcaacactgctgaagaagctgctagagcttacgacaaagaagctcgaaaaatccgtggcaaaaaagctaaggttaattttcctaacgaagatgatgaatataccattcatgctactcgtcgctacaataataatcctccaccgattcgaccacagaagcttcctctatatcatcaacaacactatcagaagaatctgaacttggaatttggttatgatctgaaccaaactgacacaattcatgctatcaatactggttctggtggtgatgagaattctttatttgggtctggttcagtttcagaggttggtttttctgtgatggagttcaatggtggttccaatcagaatgaattcggttattttggtggtgttgtgaatgaacatgaaaaagagaaagagaaagtggtagaacaagaaacacatgttgttgaacaagctgaagctgaattagcaaaaaatgaggtacaagaattgtctgatgaattgttggcatacgaggattacatgaagttttatcagatttactatgatggacaatcagtgatgccacctaataatgttcaggaacatgtggttggagatttatggagctttgattga

SEQ ID NO: 242 - protein, 305 aa, Medicago truncatula
MCGGAIIADFIPRRDGRRLTASELWPNSFGQQIDSSNFGFSHTAADQQPPSTLKRSQPPKVNERVEKPLKKQRKNLYRGIRQRPWGKWAAEIRDPRKGVRVWLGTFNTAEEAARAYDKEARKIRGKKAKVNFPNEDDEYTIHATRRYNNNPPPIRPQKLPLYHQQHYQKNLNLEFGYDLNQTDTIHAINTGSGGDENSLFGSGSVSEVGFSVMEFNGGSNQNEFGYFGGVVNEHEKEKEKVVEQETHVVEQAEAELAKNEVQELSDELLAYEDYMKFYQIYYDGQSVMPPNNVQEHVVGDLWSFD

SEQ ID NO: 243 - DNA, 723 bp, Medicago truncatula
atgtcaccccctaaaccgtatataaaccaactcaaatctctgactttcccttcaacttcaaaatcttctaaaccttcaaaaactcagtttccatacatgaactacgccttctccactaccaccctcacctccgatcaagaactctcagtcatcgtcgctgccctaaccaacgtagtctccggttccacctccaccgtcggcttagatcgaatagttcaaccggtgaacatagaaacctgtcgggaatgcaacatagcaggatgtttaggatgcaatttcttccctgaagagaaaaaacaaaaacaaaaacaaaaacaaaagagagctaagaataataagtacagaggagtgaggcagagaccatggggaaaatgggctgctgagattcgtgacccgagacgtgcggttcgtgtttggcttggaacctttaccacggcggaggaagctgctagagcttacgacaatgccgctatcgagttccgcgggccgagagccaagcttaattttccacttgttgatgaatctcttaagcgtactgttgaggatccagaattggttgttcatgtaaaggatgaagaaatgcaaattgagacaacgatgggatttgggaataatacgactgaatgtgatttttgggatagtattggggaagaagctgattttcaacaacttatgaggtttatggattcttctcattctagaacaggaaacacttttaattag

SEQ ID NO: 244 - protein, 240 aa, Medicago truncatula
MSPPKPYINQLKSLTFPSTSKSSKPSKTQFPYMNYAFSTTTLTSDQELSVIVAALTNVVSGSTSTVGLDRIVQPVNIETCRECNIAGCLGCNFFPEEKKQKQKQKQKRAKNNKYRGVRQRPWGKWAAEIRDPRRAVRVWLGTFTTAEEAARAYDNAAIEFRGPRAKLNFPLVDESLKRTVEDPELVVHVKDEEMQIETTMGFGNNTTECDFWDSIGEEADFQQLMRFMDSSHSRTGNTFN

SEQ ID NO: 245 - DNA, 1138 bp, Solanum tuberosum
attcggcacgagaccaaaaccaaaaccaagcttctctcttgttataatatatatatatataaaaaaaactcgacctttgtacaaaccatttttcatatctgtatcaatctctttgtttctgccattttgagtaaaagagtttaaatcacactaaaatgtgtggtggtgcaattctttatgatattattcctcgtgaccgccgtttgtcatccaccgacttatggccaagctctgctgatttctggcaaacttcttctttttccaagccaatttccacccaaaatgttcctcccaagcctaaacgagctcaactctctagaggtagtgagcagatgaagaagaggcaaaggaagaatctttacaggggaatccgacaacgtccatggggtaaatgggctgctgaaattcgtgacccgagaaaaagggttagggtctggttaggtactttcaacactgctgaagctgcaagagcttatgatagagaagctcgtaaaatcaggggaaagaaagctaaagttaatttccccaatgaagacgacgaccactactacagtcatccagagccgcctcctttgaacattgtttatgaatcttatgatactactagtacttacaatcaagaatcaaataactgttaccccttccactcaatcgaaaacactgaacctgttatggaattcgcaattgctaacaaaaattcatctgggtctgcttataatggaattgaagatcagaatgtggaaggagaagagcagacggtgaaaaattcaaataacaggatcgtagaggaagaggaaaaaacagaggatgaagtgcagatactttctgatgaactgatggcttatgagtcattgatgaagttctatgaaataccgtatgttgacgggcaatcagtggcggcgacggtgaatccagcggcggacaccgaagtgggcggtggctcgatggagctttggagttttgatgatgttagtcgtctacaaccaagttataatgttagtttgattattgttttgtttaaattgttgcatctttttagtttgctgaattagaactaattgagtttttgtaatttttaatcaattgtgttgaaactatatttttahttcattactctattaaaaaaaaaaaaaaaaaa

SEQ ID NO: 246 - protein, 298 aa, Solanum tuberosum
MCGGAILYDIIPRDRRLSSTDLWPSSADFWQTSSFSKPISTQNVPPKPKRAQLSRGSEQMKKRQRKNLYRGIRQRPWGKWAAEIRDPRKRVRVWLGTFNTAEAARAYDREARKIRGKKAKVNFPNEDDDHYYSHPEPPPLNIVYESYDTTSTYNQESNNCYPFHSIENTEPVMEFAIANKNSSGSAYNGIEDQNVEGEEQTVKNSNNRIVEEEEKTEDEVQILSDELMAYESLMKFYEIPYVDGQSVAATVNPAADTEVGGGSMELWSFDDVSRLQPSYNVSLIIVLFKLLHLFSLLN

SEQ ID NO: 247 - DNA, 1132 bp, Solanum tuberosum
ctttcactcaaaaaaaaaaaggaaaaaattaagagtaacaaaagatgtgtggaggtgccataatctccgattatgagcccgccggaaacttctaccggaaactctctgctcgtgacctgtgggctgagctggaccctatctccgactactggtcctcttcctcctcatcctcaactgtcgaaaacccttattccgctcagtcgccggtgactcactccgtcgataagcctaagaaatcagattccggcaaatctaatcaactcaaaaaaggtaataagactgtgaaggttgagaaggagaagagtactggaccaaggcagagaaagaacaagtacagaggaataaggcagagaccatggggaaaatgggctgctgagattcgcgatcctcagaagggtgtccgtgtttggcttggtacattcaacacagcagaggatgctgccagagcctatgatgaggctgctaagcgcattcgtggtaacaaggccaaactcaacttccctgccccatcaccacctgctaagcgacagtgcactagcactgtcgctgctgatcctccaccagcactactccttgagagttctaacataatatcttataacaattctcctttaatgaacttcggatatgatgttcagagccaaactccctactacccaatggaaatgcccgttgctagtgatgattatgaactcaaggaacagatttccaacttggaatcgttcctggaattggagccagcagattcatctgatcagttttcagggatcgtcgatcctgatcctcttaatgtttttctgatggaggattttgcttcaactcagcatcagttctattgatcctgagttgtttggtgagtgatgagtgactagtttattagcttttggctgtagtagtagtaatagagaaaaaagtacatatgatatgataataataagttgcgtgccttagcctgcaattgtaatagtatcaatgtttgttgtcttgtgttgtttatgctttctaaatcttggatttaccttataatgtttggtcatttggtgtatgtattgtaactatatatggagtactttattactaaaaaaaaaaaaaaaaaaaaaaaaaaaaaaaaaaaaaaaaaaaaaaaaaaaaa

SEQ ID NO: 248 - protein, 264 aa, Solanum tuberosum
MCGGAIISDYEPAGNFYRKLSARDLWAELDPISDYWSSSSSSSTVENPYSAQSPVTHSVDKPKKSDSGKSNQLKKGNKTVKVEKEKSTGPRQRKNKYRGIRQRPWGKWAAEIRDPQKGVRVWLGTFNTAEDAARAYDEAAKRIRGNKAKLNFPAPSPPAKRQCTSTVAADPPPALLLESSNIISYNNSPLMNFGYDVQSQTPYYPMEMPVASDDYELKEQISNLESFLELEPADSSDQFSGIVDPDPLNVFLMEDFASTQHQFY

SEQ ID NO: 249 - DNA, 1259 bp, Coffea canephora
aagtaccgcaaatttgtaagcttagatcatcaaaaatgtgtggcggtgcaatcctcgaaggcctcatcccgccccgcaacaacaacgacggcactcgccgtctctcctccgctgacctctggccctccgctgctgatttttggcccaactctcaccttgccaagcccagccgctccaacccaactgatgccccccacaaagccacgcacgaaacttgtcacgatccacatgatgaagctggtggaaagcagcaagtccttcccaagggtgccaagaggcagaggaaaaacttatacagggggatcaggcagcgaccatgggggaaatgggctgctgagattcgagaccctaggaaaggcgtgagagtctggttgggcactttcaacactgccgaagaagctgccagagcctacgacaaagaagctcgaaaaatcagaggcaagaaagccaaggttaacttcccaaacgaggattcgaccagttatcccacatgcatcccttcgcaaacccagtaccaacaggtacacatccccagccctcccactttctgtggtccctcctcctccaattgcaagttcaatcagctccgtgttgggtcgtctgattgcagtgccagtgactgctatcacgcgaacagcatcgatgattgtgcccgtttcaccaatatgatgggttttcgaaatccaagcgaagaggtttctggttctggtagttcggataatgagtgttttcttggccaccttaaacaagtagccaaggcggcggcggaggaggaggcggcttcggttataactgaaaatgatacgaaagacaataacaaagcagctgaaagcgaggagtaccaagtggaaaagctgtctgaggagctgctggcctatgagtccttcatgaagttctatcagattccttatatagatgggcagtccgcagctgcatcggccaaccctgctcaagagctggcaacttctattcagctttggagctttgatgatgtctcacccgccaatcgcccaatgcctctgtaaccgccaatcgcccaagttcgatggtcttttttttgggagtcccaattgcgttttggtgcctagtttttgtaggttttgctatgtaattgacattaacttcttaaaacattgtaggaaattgttgttaggttgcaggttggtactcttgaccggcttgtttagttaaaatacctatatgtaggttggcactttgtaattactgtttttgtggacaaaaaaaaaaaaaaaaaaaaa

SEQ ID NO: 250 - protein, 329 aa, Coffea canephora
MCGGAILEGLIPPRNNNDGTRRLSSADLWPSAADFWPNSHLAKPSRSNPTDAPHKATHETCHDPHDEAGGKQQVLPKGAKRQRKNLYRGIRQRPWGKWAAEIRDPRKGVRVWLGTFNTAEEAARAYDKEARKIRGKKAKVNFPNEDSTSYPTCIPSQTQYQQVHIPSPPTFCGPSSSNCKFNQLRVGSSDCSASDCYHANSIDDCARFTNMMGFRNPSEEVSGSGSSDNECFLGHLKQVAKAAAEEEAASVITENDTKDNNKAAESEEYQVEKLSEELLAYESFMKFYQIPYIDGQSAAASANPAQELATSIQLWSFDDVSPANRPMPL

SEQ ID NO: 251 - DNA, 1394 bp, Hordeum vulgare
caggaagagaaaacaatgtgtggcggcgccatcctagcgcagctgatcccgccgtcggcgggccgtccgtcgaagcaggcggcagcgggcggccgggccccgcccacgagctccaagaagggcggcgtgagcaagagccgccacagcagcaccccagatgccgacgacgacgtcttcgaggccgccttcgaggacttcgatgaccacttcgacctgcgggcggaggaggacggcggcgacgaccatgtcgtctttgcatccaagcctgccttctctccacgtccggcctacgacggtggccgcgcggcgcatgcggcgagcaggaagaagcgcaccggccacctccatggcatccggcagcggccgtggggcaagtgggcggcggagatccgcgacccgcacaagggcacccgcgtctggctcggcacgttcgacacggccgatgatgccgcccgggcctacgacgtcgccgcccgtcgcctccgtggcagcaaggccaaggtcaacttccccgacgcggccaggaccggggctcgcccgcgccgcgccagccgtagaaccgcgcagaaaccgcaatgcccccctgcgcggacgacggcgtactctgccaccgcagcagcacgcgcacagccggagcaggacgctatgatggtcaaacccgagctgatggagtttttcaacgtggacgccatcgtccacctgaccactgccgtcgccgcgctaccgcctgtcacggcgagcaccttcgccgacacgatgccgagggtcgacgaggactcttctgtggggagcggcggcggcgccatgctggggttcgccgacgagcttgggttcgatccgttcatgatgttccagctaccctgctcggacatgtacgaatccgccgacagcatcttcgccggagacgctgtcatcccggatgccctcagcgtggacagtggcatggacgccgtcagcctctggagcttcgacgagttccccatggacagcgccattttctgacgctttccgtgtgatgcactgcactctgttggttgtaagaatctccacctggcctctacgtagttccttgtaaatgcccgcgcacagaaccttgctcagaccagattctgtttcttggccaggaacgaaaggaagggttgctgccgatgcatgattgcttcctcgatgaacgcagattcgaaatgtattctactgtttgagtttcttgttcgtcacacactgtaccaaactgtattgtaccctatcataatttctgctcggtacctctctgtactgctggtaccaaactgtattgtactctgtcatgatctgtactagtctttggtactgctggtcaatagtcctacgaattgatcaaaaaaaaaaaaaaaaaaaaaaaaaaaaaaaaaaaa

SEQ ID NO: 252 - protein, 328 aa, Hordeum vulgare
MCGGAILAQLIPPSAGRPSKQAAAGGRAPPTSSKKGGVSKSRHSSTPDADDDVFEAAFEDFDDHFDLRAEEDGGDDHVVFASKPAFSPRPAYDGGRAAHAASRKKRTGHLHGIRQRPWGKWAAEIRDPHKGTRVWLGTFDTADDAARAYDVAARRLRGSKAKVNFPDAARTGARPRRASRRTAQKPQCPPARTTAYSATAAARAQPEQDAMMVKPELMEFFNVDAIVHLTTAVAALPPVTASTFADTMPRVDEDSSVGSGGGAMLGFADELGFDPFMMFQLPCSDMYESADSIFAGDAVIPDALSVDSGMDAVSLWSFDEFPMDSAIF

SEQ ID NO: 253 - DNA, 985 bp, Cucumis melo
aattctctaatcatgtgtggcggcgccattatcgccgacttaatccctcgccgtgacggccaacgcgttaccgcttccgacatttggcctaactcctccttcttccatttcaacaaaattcgctccgatcaagtttcaactcccctcaaacgaacccccctcccggcctcttccgaggcttcgaagcccaagaagaggcagaggaagaatctttacagaggaattcgtcagcgcccgtggggaaaatgggcggctgagattcgtgaccccaggaaggggatccgtgtctggcttgggactttcaatactgctgaggaagccgctcgagcttacgatcgagaagctcgcaagattcgtggaaagaaagctaaggtcaatttccctaatgaagatgatgcatattccattcaagctcccattcctcaatttcaccctcatctttacactgtccctgagaattccgaattcccctacgatctcaaccaaatcggtgatttcaccggcactcactttcccgtggcgattgaggaacaatccggctctgggtcggaggattcttattctccaccgaaaagattcggtgtgaaagaggctgaagatcagaagccggagcagaaggttagcgttattgccgcggcggaggaagagaacgaggtgcaaaagctttctgaggaactaatggcgtatgagaactacatgaagttctaccaaattccatacctcgacggtcaatcgacggtgacgaatccggctgaagaacaagtggtgggcgatctctggagcttcgacgacgaggatgggcttcacggctctgtttcgtcgtctgaattatgatgattgatgatccaataacttctccatatctcaaaccggtttcctccattttctattgttgttttgttatttaattccagaatgtgttttatgtaattttctgtcgttgaacgatgtcaatttgttgatatgaaaaaaaaaaaaaaaaaaa

SEQ ID NO: 254 - protein, 273 aa, Cucumis melo
MCGGAIIADLIPRRDGQRVTASDIWPNSSFFHFNKIRSDQVSTPLKRTPLPASSEASKPKKRQRKNLYRGIRQRPWGKWAAEIRDPRKGIRVWLGTFNTAEEAARAYDREARKIRGKKAKVNFPNEDDAYSIQAPIPQFHPHLYTVPENSEFPYDLNQIGDFTGTHFPVAIEEQSGSGSEDSYSPPKRFGVKEAEDQKPEQKVSVIAAAEEENEVQKLSEELMAYENYMKFYQIPYLDGQSTVTNPAEEQVVGDLWSFDDEDGLHGSVSSSEL

SEQ ID NO: 255 - DNA, 1010 bp, Malus x domestica
ctgagagggctcttttttctctctaagtttctacaagtggcaatataaacatgtgtggtggtgctatcatttccgacttcatcgccgtcaagcgcgccctgaagctgacggcggaggacctctggtcagatcttgacaccatctctgacctccttggcatagactactccaacagcatcaacaaacagccggagaatcacaaggtggtccaaaagccgaaaccatctatcaccaaagtagtgacaagtgatgagaagcccaagcaggcgagcgggtctgctgctgccgcaaaaggcaagagagtgagaaaaaacgtgtacagaggaataaggcagaggccgtggggcaaatgggcggctgagattcgcgacccctacaaagccgtccgggtctggctcggcacctatgacaccgctgaggaagccgcccgcgcttacgatgaagccgccgtgcgcatccgcggggacaaggccaagctcaactttgcccaaccaccatcctcttcaccgcttccatctctggcgccggatacgccgccgccgacaaagaggcggtgcattgttgctgagtcaactcgggtggagccgactcaaccgagtttccagaccggttcttactattatgatccattatatcacggcggtggtggtggggaaatgtatgctaagaaagaggtggcgggtggggacgaggtggtggtagagcagctgagtcaggtggtgagtggaagcggagagtcggactcgttgtacctgtggatgctggatgacctggtggcatatcagcaacaagggcagcttctgtattaaggcagcggaattgttctagctaaatatttgtatggctaggaattaaaaacatattaattaaagggtatgtatgtttaatttacgtgtgtgaaatgcgagtgttgagtatgtctatgactgggtttgtgtaacgtgtgttgtttgctacggtgtttatgtttaatagtaactgcttttgtctttgaaaaaaaaaaaaaaaaa

SEQ ID NO: 256 - protein, 252 aa, Malus x domestica
MCGGAIISDFIAVKRALKLTAEDLWSDLDTISDLLGIDYSNSINKQPENHKVVQKPKPSITKVVTSDEKPKQASGSAAAAKGKRVRKNVYRGIRQRPWGKWAAEIRDPYKAVRVWLGTYDTAEEAARAYDEAAVRIRGDKAKLNFAQPPSSSPLPSLAPDTPPPTKRRCIVAESTRVEPTQPSFQTGSYYYDPLYHGGGGGEMYAKKEVAGGDEVVVEQLSQVVSGSGESDSLYLWMLDDLVAYQQQGQLLY

SEQ ID NO: 257 - DNA, 1354 bp, Oryza sativa
  misc_feature (37)..(37): n is a, c, g, or t
  misc_feature (1324)..(1324): n is a, c, g, or t
ggcacgcgcctcctcggaatcgccacgagacccttgnagccagataaaaaaggaaaaaaagagagtcgtagttcgcctcttcttcctcctctcgttctcgcggccatatcgaattcctgcagcccgggggatccccgaattcagctcagtaaatctgttgattgctcgtttcaaatcatcatcggtgtttcgtttcttgatttcttgatccatccatggcgacgacagtggattggtgtggccgtggcagcaatcttcctgctgcgatgtatgacatggtggtggatagcaaggagctaatgggcgcgcttgctccgtccatggtgtccttctcctacccgtgttccgagcagagcgcgagctcgcttcttgctggcgccaactacctgactcccgcgcaggtgctccatgtccaggcgcagctacagcgcctgcgccgcccgggcgcggcgagcggctgcctcgccgcggcgccgccgctgccgatgaagcggcatggcgcggtggcggtggcggcggcggcggcggcggcgcgggcgccggtcaagctgtaccgcggcgtcaggcagcggcattggggcaagtgggtggcggagatccgcctgccgcgcaaccgcacccgcctctggctgggcaccttcgacaccgccgaggaggccgcgctggcgtacgacagcgccgcgttccgcctccgcggcgagtccgcgaggctcaacttccccgagctccgccgcggcggcgcccacctcggcccgccgctccacgccgcggtcgacgccaagctccacgccatctgccacgggatggacctgccccaaccccaaccccaaacccagagcaatgcgacgacgacgacgatgtcgacgacggcgacgaacaccccaagccccttcttctcctcggagagcccggtggtcaagagcgagcccgtctgctccgcctccgagagctcttcctcggccgacggcgacgtgtcatcgacgggctcctccgacgtcgtcccggagatgcagctgctcgacttctcggaggcgccatgggacgagtccgagagcttcctgctgcacaagtacccgtcgctggagatcgactgggacgccgatcctttcctgatgcagtggctgaatcttcttcctctccctgttcttgactccagctcttggtgtcctgaacattttcacaactcagagagtgatgctctaccttgattagctacatgttaatctaggttttgggtttgatcatgccatcggattctgtagcatcaacccctggtctgcttggttttttcaagtggcattgcacaggaaggaggtctcagagntttggtaattgcgagttgtgcaaccctgca

SEQ ID NO: 258 - protein, 330 aa, Oryza sativa
MATTVDWCGRGSNLPAAMYDMVVDSKELMGALAPSMVSFSYPCSEQSASSLLAGANYLTPAQVLHVQAQLQRLRRPGAASGCLAAAPPLPMKRHGAVAVAAAAAAARAPVKLYRGVRQRHWGKWVAEIRLPRNRTRLWLGTFDTAEEAALAYDSAAFRLRGESARLNFPELRRGGAHLGPPLHAAVDAKLHAICHGMDLPQPQPQTQSNATTTTMSTTATNTPSPFFSSESPVVKSEPVCSASESSSSADGDVSSTGSSDVVPEMQLLDFSEAPWDESESFLLHKYPSLEIDWDADPFLMQWLNLLPLPVLDSSSWCPEHFHNSESDALP

SEQ ID NO: 259 - DNA, 962 bp, Oryza sativa
ggcttaaacaatggcgacgacagtggattggtgtggccgtggcagcaatcttcctgctgcgatgtatgacatggtggtggatagcaaggagctaatgggcgcgcttgctccgtccatggtgtccttctcctacccgtgttccgagcagagcgcgagctcgcttcttgctggcgccaactacctgactcccgcgcaggtgctccatgtccaggcgcagctacagcgcctgcgccgcccgggcgcggcgagcggctgcctcgccgcggcgccgccgctgccgatgaagcggcatggcgcggtggcggtggcggcggcggcggcggcgcgggcgccggtcaagctgtaccgcggcgtcaggcagcggcattggggcaagtgggtggcggagatccgcctgccgcgcaaccgcacccgcctctggctgggcaccttcgacaccgccgaggaggccgcgctggcgtacgacagcgccgcgttccgcctccgcggcgagtccgcgaggctcaacttccccgagctccgccgcggcggcgcccacctcggcccgccgctccacgccgcggtcgacgccaagctccacgccatctgccacgggatggacctgccccaaccccaaccccaaacccagagcaatgcgacgacgacgacgatgtcgacgacggcgacgaacaccccaagccccttcttctcctcggagagcccggtggtcaagagcgagcccgtctgctccgcctccgagagctcttcctcggccgacggcgacgtgtcatcgacgggctcctccgacgtcgtcccggagatgcagctgctcgacttctcggaggcgccatgggacgagtccgagagcttcctgctgcacaagtacccgtcgctggagatcgactgggacgcgatcctttcctgatgcagtggctgaatcttcttcctctccctgttcttgaacccagctttcttgtacaaag

SEQ ID NO: 260 - protein, 297 aa, Oryza sativa
MATTVDWCGRGSNLPAAMYDMVVDSKELMGALAPSMVSFSYPCSEQSASSLLAGANYLTPAQVLHVQAQLQRLRRPGAASGCLAAAPPLPMKRHGAVAVAAAAAARAPVKLYRGVRQRHWGKWVAEIRLPRNRTRLWLGTFDTAEEAALAYDSAAFRLRGESARLNFPELRRGGAHLGPPLHAAVDAKLHAICHGMDLPQPQPQTQSNATTTTMSTTATNTPSPFFSSESPVVKSEPVCSASESSSSADGDVSSTGSSDVVPEMQLLDFSEAPWDESESFLLHKYPSLEIDWDAILS

SEQ ID NO: 261 - DNA, 894 bp, Oryza sativa
atggcgacgacagtggattggtgtggccgtggcagcaatcttcctgctgcgatgtatgacatggtggtggatagcaaggagctaatgggcgcgcttgctccgtccatggtgtccttctcctacccgtgttccgagcagagcgcgagctcgcttcttgctggcgccaactacctgactcccgcgcaggtgctccatgtccaggcgcagctacagcgcctgcgccgcccgggcgcggcgagcggctgcctcgccgcggcgccgccgctgccgatgaagcggcatggcgcggtggcggtggcggcggcggcggcggcgcgggcgccggtcaagctgtaccgcggcgtcaggcagcggcattggggcaagtgggtggcggagatccgcctgccgcgcaaccgcacccgcctctggctgggcaccttcgacaccgccgaggaggccgcgctggcgtacgacagcgccgcgttccgcctccgcggcgagtccgcgaggctcaacttccccgagctccgccgcggcggcgcccacctcggcccgccgctccacgccgcggtcgacgccaagctccacgccatctgccacgggatggacctgccccaaccccaaccccaaacccagagcaatgcgacgacgacgacgatgtcgacgacggcgacgaacaccccaagccccttcttctcctcggagagcccggtggtcaagagcgagcccgtctgctccgcctccgagagctcttcctcggccgacggcgacgtgtcatcgacgggctcctccgacgtcgtcccggagatgcagctgctcgacttctcggaggcgccatgggacgagtccgagagcttcctgctgcacaagtacccgtcgctggagatcgactgggacgcgatcctttcctga

SEQ ID NO: 262 - protein, 297 aa, Oryza sativa; identical to SEQ ID NO: 260

SEQ ID NO: 263 - DNA, 929 bp, Triticum aestivum
gctctcctcggcttcccttcctccaaatcgtcggcgtttcttgatcgacgagggcatggcgacgacggtggactggcgcagctataggcccgatcttcctgccgcgatgtatcacatggtggacagcagggaccaggtaatgcacgcgtttgctccggcgacggcgcagggcgcggctccgaccatctcgttcgccttcccctgccccggcgcggagcagagcgccggcctgcttcgtggcgccagctacctcactcccgcgcaaatcctccagctccagtcgcagctgcaccacgtgcgccgggcgccgggcgcggccatggccgcggtggggcagccgatgaagcggcacggcgtggcagcgctcccggcgcggccggcgaccaagctttaccgcggcgtaaggcagcggcattgggggaagtgggtcgccgagatccgcctgccccgcaaccgcacccgcctctggctcggcaccttcgacaccgccgacgaggccgcgctggcctacgacgccgccgccttccggctccgcggcgagtcctccaggctcaacttccccgagctcaggcgcggcggcgagcaccacggcccgccgctcgacgccgcgatcgacgccaagctccgctccatctgccacggggaagacatgccccagagccagagcgatgagacgccggcgccgacgacgacactgacgccgatttctttcccggacgtcaagagcgagccagtctgctccgtctccgagagctcgtcgtcggctgacggcgaggtgtcctcgtgctccgacgtcgtcccggagatgcagcttcttgatttctcggaggctccatgggacgagttcctgctgcgcaagtacccgtcgctcgagatcgactgggacgcgatcctttcttgaatcaagttcatgctcgatccacagctcg

SEQ ID NO: 264 - protein, 281 aa, Triticum aestivum
MATTVDWRSYRPDLPAAMYHMVDSRDQVMHAFAPATAQGAAPTISFAFPCPGAEQSAGLLRGASYLTPAQILQLQSQLHHVRRAPGAAMAAVGQPMKRHGVAALPARPATKLYRGVRQRHWGKWVAEIRLPRNRTRLWLGTFDTADEAALAYDAAAFRLRGESSRLNFPELRRGGEHHGPPLDAAIDAKLRSICHGEDMPQSQSDETPAPTTTLTPISFPDVKSEPVCSVSESSSSADGEVSSCSDVVPEMQLLDFSEAPWDEFLLRKYPSLEIDWDAILS

SEQ ID NO: 265 - DNA, 999 bp, Triticum aestivum
gctctcctcggcttctcttcctccaaatcgtcggcgtttcttgatcgacagggcatggcgacgacggtggactggcgcagctataggcccgatcttcctgcggcgatgtaccgcatggtggacagcagagaccaggtaatgcacgcgttcgctccgccgacggcgcagggcgcggctccgaccatctcgttcgccttcccatgccccggcgcggatcagagcgccggcctgcttcgtggcgccacctacctcactcccgcgcaaatcctccagctccagtcgcagctccaccacgtgcgccgggcgccgggcgcgcccatggccgcggtggggcagccgatgaagcggcacggcgtggcggcgctcccggcgcggccggcgaccaagctgtaccgcggcgtgcggcagcggcattgggggaagtgggtcgcggagatccgcctgccccgcaaccgcacccgcctctggctcggcaccttcgacaccgccgacgaggccgcgctggcctacgacgccgccgccttccggctccgcggcgagtccgccaggctcaacttccccgagctcaggcgcggcggcgagcaccacggcccgccgctcgatgccgcgatcgacgccaagctccgctccatctgccacggggaagacatgccgcagagccagagcaatgagacgccggcgccgacgccgacactgacgccgatttctttcccggacgtcaagagcgagccagtctgctccgtctccgagagctcttcgtcggctgacggcgaggtgtcctcgtgctccgacgtcgtcccggagatgcagcttcttgatttctcggaggctccatgggacgagtccctgctgcgcaagtacccgtcgctcgagatcgactgggacgcgatccttccttgaatcaagttcatgctcgatccacagctcgtccaaagtgattacttcggcttccacttaggctcgatcgagtatacgcgtgtagcatcaacccctccctgc

SEQ ID NO: 266 - protein, 281 aa, Triticum aestivum
MATTVDWRSYRPDLPAAMYRMVDSRDQVMHAFAPPTAQGAAPTISFAFPCPGADQSAGLLRGATYLTPAQILQLQSQLHHVRRAPGAPMAAVGQPMKRHGVAALPARPATKLYRGVRQRHWGKWVAEIRLPRNRTRLWLGTFDTADEAALAYDAAAFRLRGESARLNFPELRRGGEHHGPPLDAAIDAKLRSICHGEDMPQSQSNETPAPTPTLTPISFPDVKSEPVCSVSESSSSADGEVSSCSDVVPEMQLLDFSEAPWDESLLRKYPSLEIDWDAILP

SEQ ID NO: 267 - DNA, 847 bp, Triticum aestivum
tcctccagctccagtcgcagctccaccacgtgcgccgggcgccgggcgcggccatggcagtggcggggcagcccatgaagcggcacggcgttgcggcgctcccggcgcagccggcggccaagctgtaccgcggcgtgcggcagcggcattgggggaagtgggtcgccgagatccgcctgccccgcaaccgcacccgcctctggctcggcaccttcgacaccgccgacgaggccgcgctggcctacgacgccgccgccttccggctccgcggcgagtccgccaggctcaacttccccgagctcaggcgcggcggcgagcaccacggcccgccgctcgacgccgcgatcgacgccaagctccgctccatctgccacggggaggacctgccgcagagccagagcaatgcgacgccggcgccgacgccgaccctgacgccgagctctttcccggacgtcaagagcgagccaggctgctccgtctccgagagctcgtcgtcggccgacggcgaggtgtcctcgtgctccgacgtcgtcccggagatgcagcttcttgatttctcggaggctccatgggacgagtccctgctgcgcaagtacccgtcgctcgagatcgactgggacgcgatcctttcttgaaccgagttcatgcccgatccacagctcgttcaaagtgattgcttctgctttcgttaggctcttagataggttattatgggtttgatcaagtattcttgtgtaacatcaatccctgctctgcttggtttttgaatggcattgccaggaaggaggttttatgtagaaattttaagtatgtcatgtagtttgtgattcatttttttttttttttt

SEQ ID NO: 268 - protein, 193 aa, Triticum aestivum
MAVAGQPMKRHGVAALPAQPAAKLYRGVRQRHWGKWVAEIRLPRNRTRLWLGTFDTADEAALAYDAAAFRLRGESARLNFPELRRGGEHHGPPLDAAIDAKLRSICHGEDLPQSQSNATPAPTPTLTPSSFPDVKSEPGCSVSESSSSADGEVSSCSDVVPEMQLLDFSEAPWDESLLRKYPSLEIDWDAILS

SEQ ID NO: 269 - DNA, 1654 bp, Oryza sativa
tttttctcttctggattcttgccgatttttaggcttcctttgcttttctaaggccagaaagggttgttttgcaatacccttctagttcatcctctcaaatttttcttctttctattcaaaagctctttctttctttgcaccctttgtttctctacttttattgaggaacagggctgatttttcacttcttgcatccaaaaagcaccccttttttctttcctgtttttaagatttccatacccttgccatcttcatcttctacctccatccagtcctcatggccgcagcaatagacatgtacaagtataacactagcacacaccagatcgcatcctcggatcaggagctcatgaaagcgctcgaaccttttattaggagcgcttcttcttcctccgcttcctccccctgccaccactactactcttcttctccttccatgagccaagattcttacatgcccaccccatcttatcccacttcctctatcacaaccgccgccgccaccaccacctcgtctttctcgcagctacctccgctgtactcttcgcagtatcatgctgcttcacctgcggcgtcggcgacgaacgggccgatggggctgacccacctgggcccagcccagatccagcagatccaggcccagttcttggcccagcagcagcagcagagggccctggccggcgccttccttcggccgcgtggccagccgatgaagcagtccgggtcgccgccgcgcgcggggccgttcgcggcggtcgccggggcggcgcagtcgaagctctaccgcggagtgcggcagcgccactgggggaagtgggtggcggagatccgcctcccgaagaaccggacgcggctgtggctcggcaccttcgacaccgccgaggacgccgcgctcgcctacgacaaggccgccttccgcctccgcggcgacctcgcgcggctcaacttccccaccctccgccgcggcggcgcccacctcgccggcccgctccacgcctccgtcgacgccaagctcaccgccatctgccagtccctcgccacgagctcgtccaagaacacccccgccgagtcagcggcctccgcggcggagccggagtcccccaagtgctcggcgtcgacggaaggggaggactcggtgtccgccggctcccctcctccgcccacgccgctgtcgcccccggtgccggagatggagaagctggacttcacggaggcgccatgggacgagtcggagacattccacctgcgcaagtacccgtcctgggagatcgactgggactcaatcctctcataaacaagcagaagcagctactactagtctattactagtactagtagtagtcttcgtcaagctagagtcactcaactcaactagctgtgtaatcttctctgaattccgtggcttccatggctcggtggcattttagacgtcggccatggctgctgcgagtagcagtaactagtcagtactcagtagtagtaaggtcgttggtattacgtcgtcgtgcaagtgtcgttggtgtactcagtgatctgatctcctggttgagctgccggttgtttttttcacggcgcggccggtcgagaattaagctgtaatcccttgttacatgttggaaattcagtagcttatgtaactatatgtacctttctc

SEQ ID NO: 270 - protein, 338 aa, Oryza sativa
MAAAIDMYKYNTSTHQIASSDQELMKALEPFIRSASSSSASSPCHHYYSSSPSMSQDSYMPTPSYPTSSITTAAATTTSSFSQLPPLYSSQYHAASPAASATNGPMGLTHLGPAQIQQIQAQFLAQQQQQRALAGAFLRPRGQPMKQSGSPPRAGPFAAVAGAAQSKLYRGVRQRHWGKWVAEIRLPKNRTRLWLGTFDTAEDAALAYDKAAFRLRGDLARLNFPTLRRGGAHLAGPLHASVDAKLTAICQSLATSSSKNTPAESAASAAEPESPKCSASTEGEDSVSAGSPPPPTPLSPPVPEMEKLDFTEAPWDESETFHLRKYPSWEIDWDSILS

SEQ ID NO: 271 - DNA, 834 bp, Arabidopsis thaliana
atggctttaaacatgaatgcttacgtagacgagttcatggaagctcttgaaccattcatgaaggtaacttcatcttcttctacttcgaattcatcaaatccaaaaccattaactcctaatttcatccctaataatgaccaagtcttaccggtatctaaccaaaccggtccgattgggctaaaccagctcactccaacacaaatcctccaaattcagacagagttacatctccggcaaaaccaatctcgtcgtcgcgctggtagtcatcttctcaccgctaaaccaacctcaatgaagaaaatcgacgtagcaactaaaccggttaaactataccgaggcgtaagacagaggcaatggggtaaatgggtagctgagattcggctacctaaaaaccgaacccggttatggctcggtacgttcgaaacggctcaagaagctgcattagcttacgatcaagcagctcataagatcagaggagacaacgctcgtctcaatttcccagacattgttcgtcaaggacactataaacagatattgtctccgtctatcaacgcaaagatcgaatccatctgcaatagttctgatcttccactgcctcagatcgagaaacagaacaaaacagaggaggtgctctctggtttttccaaaccggagaaagaaccggaatttggggagatatacggatgcggatactcgggctcatctcctgagtcggatataacgttgttggatttctcaagcgactgtgtgaaagaagatgagagtttcttgatgggtttgcacaagtatccttctttggagattgattgggacgctatagagaaactcttcgga

SEQ ID NO: 272 - protein, 278 aa, Arabidopsis thaliana
MALNMNAYVDEFMEALEPFMKVTSSSSTSNSSNPKPLTPNFIPNNDQVLPVSNQTGPIGLNQLTPTQILQIQTELHLRQNQSRRRAGSHLLTAKPTSMKKIDVATKPVKLYRGVRQRQWGKWVAEIRLPKNRTRLWLGTFETAQEAALAYDQAAHKIRGDNARLNFPDIVRQGHYKQILSPSINAKIESICNSSDLPLPQIEKQNKTEEVLSGFSKPEKEPEFGEIYGCGYSGSSPESDITLLDFSSDCVKEDESFLMGLHKYPSLEIDWDAIEKLFG

SEQ ID NO: 273 - DNA, 1083 bp, Oryza sativa
atggcggccatagatttgtacaagtatcagctgagctcctcgtcctcgtcttcttcctcggatcaggagctcatgaaagcgctcgaaccttttatcaggagcgcttcacccacctccacctccacctccacgccattgttctactcctctagctccatctccaccaccaccaccactcccttctcctactcgtctccattgccgcaagaatcgtactacctccctgcttcttcgtcctacgccgccattgttccacctccgacgacgacgacgaacaccaccacctccttctcggagctccctcccctgcctccctcctcctcgtcgttcgcctcgccggcgaatgctgcggcggtggggctggctcaccttggcccggagcagatccagcagattcaggtgcagttcttgatgcagcagcagctgcagcagcgggggatggcggcgtcggcgtcggcgtcggcggcggcgtcgtaccttggcccgcgggcgcagcccatgaagcaggccggggcggcggcggcggcggcggccggcggcaagatgtaccgcggcgtgcggcagcggcactgggggaagtgggtggcggagatccggctgccgaagaaccggacgcggctgtggctgggcacgttcgacaccgccgaggacgcggcgctcgcctacgacaaggcggcgttccgcctccgcggcgacgccgcgcgcctcaacttccccacgctccgccgcggcggcgcccacctcgccggcccgctccacgcctccatcgacgccaagctcaccgccatctgccacagcctcgccgccgcgccgcccgcctcctccaagaaagccgccgccgccgccgctcacccggactcgcccaaaggctccgcgtcgacgacgaccacgacgtcggagggagacgagtcggcgatctccgcctgttcgcctcctctcccgccgccgccaccgccgccgccggcggcgctccccgagatggcaaaccttgacttcacggaggcgccatgggacgaatccgacgccttccacctctacaagtgtccgtcatgggagatcgactgggactccatcctctcgtga

SEQ ID NO: 274 - protein, 360 aa, Oryza sativa
MAAIDLYKYQLSSSSSSSSSDQELMKALEPFIRSASPTSTSTSTPLFYSSSSISTTTTTPFSYSSPLPQESYYLPASSSYAAIVPPPTTTTNTTTSFSELPPLPPSSSSFASPANAAAVGLAHLGPEQIQQIQVQFLMQQQLQQRGMAASASASAAASYLGPRAQPMKQAGAAAAAAAGGKMYRGVRQRHWGKWVAEIRLPKNRTRLWLGTFDTAEDAALAYDKAAFRLRGDAARLNFPTLRRGGAHLAGPLHASIDAKLTAICHSLAAAPPASSKKAAAAAAHPDSPKGSASTTTTTSEGDESAISACSPPLPPPPPPPPAALPEMANLDFTEAPWDESDAFHLYKCPSWEIDWDSILS

SEQ ID NO: 275 - DNA, 1076 bp, Asparagus officinalis
ccacctttgatcactcctcgccatcaaactccagtcttttgagcatggaccagcctgatctgagccaagttgggccagttgggctgacccaactgagcccacttcaaatccagcagatccaagctcaaatccagctcaaccaccaacaccagctaatggtctccagaaccctgcaagctagaaattaccataacaccctcggtgtaaagccccagcccatgaagctccaggcctcggtcgctgcacctcagtcaaaacccacgaagctctacagaggggtgaggcaaaggcactggggtaaatgggttgcagagatcagactgccgaagaatcgaaccaggctttggcttggaacctttgacactgctgaagaagctgccttggcctatgacaaggctgcttacaaattgagaggggactacgcgaggctcaatttccctaacctgaagcatacccatctggctggcaaccctctgcactcgtctgttgatgccaagctcgaagcaatttgccagaccctggagagccctgggaagaagaaggttagcaccgggtcgaagcctgagccggttgtttcatcgccgactgttgagaccgaggaggagtcttcctcttcttcttcggtgacgggggcgacgaattctccggtttcagagatcgagagcttggatttcaatgaggtgccgtgggatgagactgaggactttgtgttgaggaaatacccatcctatgagattgattgggattctatattgtcttcagcttagtagtgtctggtttgtgcttgttgttgttagatttgggggtctttagtggctgttgcaaatggagtttttggcatttgcgtagccttgttcagggatttttagtttagtttatttttttttctttcttttagagtgtaagaactcatggcctctgctgattatttttgcttggcgaggccgttgaggggttaagtgtactactattgtcagttccaggtgtaactcttctctgttgcagctttgtaagtatgagtgtatcttgtgtttaattaaggtatatttgtagcttttgaaaaaaaaaaaaaaaaa

SEQ ID NO: 276 - protein, 240 aa, Asparagus officinalis
MDQPDLSQVGPVGLTQLSPLQIQQIQAQIQLNHQHQLMVSRTLQARNYHNTLGVKPQPMKLQASVAAPQSKPTKLYRGVRQRHWGKWVAEIRLPKNRTRLWLGTFDTAEEAALAYDKAAYKLRGDYARLNFPNLKHTHLAGNPLHSSVDAKLEAICQTLESPGKKKVSTGSKPEPVVSSPTVETEEESSSSSSVTGATNSPVSEIESLDFNEVPWDETEDFVLRKYPSYEIDWDSILSSA

SEQ ID NO: 277 - DNA, 1013 bp, Aloe vera
aaatccaatctttcgaccgccgacctgagccagctgtgcccgataggtttgaatcacctgagctcgctccagatccaacaaattcaagcccagatccagctcaaccagcagcagcagctcatgatatcgagagccatgcaagcaaggaactataacctcggggtgagatctcagcccatgaagctcgccgccgctgcagcgccgcctcagccgaagccgacgaagctctacaggggcgtgaggcagcggcactggggcaagtgggtggccgagatcagactaccgaagaacaggacaaggctctggctcggcacttttgacacagccgaggaggccgccttggcctacgacaaggccgcctacaagctgaggggggactacgccaggctcaacttcccccacctgaagcacaccggtgcccacctggctcccggcggccccctgcactcctctgtggacgccaagctgcaggccatctgccagagcttggagcagaataagagctcaaactcaaactcatcaaagaaagagaagaggggggatgcagtagaagaaaaatctgacaaggtggtggttgttgttgccgagggcgaggagtcttgctcatcttcttcgatgaacacggggagtgcgagctcgccatcgtcggagatagagagcctggacttcacggaggtgccatgggatgagtctgaggactttgtgctgaggaaatacccttcatgggagattgattgggatgctatactgtcttaatgttttggtagtcgttgtgttttgtggtttgtttctagggtttttagtcgttggtggctggttgcaaatggagtttttggcatttgcacagccttttagagctcaaggtctttgctggttattttttcttggcaaaggactgggtggggggagtagttctgtttcagatttcaggttgttgttattgtcatctttgtagtagctttgtattataatcagtttatttgtgttccagttcttaaaaaaaaaaaaaaaaa

SEQ ID NO: 278 - protein, 211 aa, Aloe vera
MISRAMQARNYNLGVRSQPMKLAAAAAPPQPKPTKLYRGVRQRHWGKWVAEIRLPKNRTRLWLGTFDTAEEAALAYDKAAYKLRGDYARLNFPHLKHTGAHLAPGGPLHSSVDAKLQAICQSLEQNKSSNSNSSKKEKRGDAVEEKSDKVVVVVAEGEESCSSSSMNTGSASSPSSEIESLDFTEVPWDESEDFVLRKYPSWEIDWDAILS

SEQ ID NO: 279 - DNA, 1493 bp, Gossypium hirsutum
acctcttttaatccgttctggatttaggacctgttcttcaagttttggtaagaaacaggttaattttttattaaaatttggtcctcatcttatttctagttttagtgtaatggcagctgcaatggatttcattagtattggagtagatcaatcagatctatatgggggagaattgatggaagctctcgaaccttttatgaaaagtgtttcctcctcttccccttccccttccccttccccttccccttcttctcttccttctacttcttacctttctttctcttcttccgaaacacaacctaatttttacccagatagctgttgttacccttaccctacaccaatggactcagtatcatgtccccaacagcctcaaactggttcaacaattgggctaaatagcttgacacaagctcagatccatcagatccagcttcaattccacctccacaacaaccaaccaagctacctttgccaaagtccccaacccaacaccatcagcgccaatagtaacccgatggttagctttctttgccctaaacctgtcccaatgaaacacgtgggtgcgccatccaaacccaccaaactttacagaggagttaggcaacgccactggggaaaatgggtcgctgagatccggttacctagaaaccggacacgtctttggttaggcacttttgacactgctgaggaagcagccttggcttatgacaaagcagcttataaactaagaggtgactttgcgagactcaacttccctaaccttcgtcaccacggttcccacgtaggtgactacaagcctttgccttcctctgttgacgctaagcttcaagccatttgtgagagcttggtacaaaaccctaagcaagggagcaagaagaaatcatccaaggttacggcagacaccaaaagcaggaacaacaaaaaatccgacatggcagagccaaagcccgaggagaatacagcgaaagtggagaactcctcatctttgtctacggttcaatccgagagtgagggttcggctgtatcttcacctttatcagatcttacattctcggatttcgacgaacaaccatggccggaagtcgtttcttcttcggaaacttttatgttgtccaagtacccttcagagatcgattgggattccattctaaaagcctgaagggaaaaacccaagtttcgttttctgtgtaacagtcttttgttgtttaggagtttcctttcgtgtatttttttttgtaaagctagctgcaatggagtttttggcagttgcagtggcatgtattttaggttattaagagtctgttaatgagtgtaagtgcttgtgttcataagaatttgtgattttctccatgctggtcagctcgtttttttacttgctgaaccaaaaggtgaaatttgttagtgtctataaaaaaagtttatagcttttgtattttgtacgaattaaatgttatttatgttgttgtattctctggtatcgtgttttcttc

SEQ ID NO: 280 - protein, 350 aa, Gossypium hirsutum
MAAAMDFISIGVDQSDLYGGELMEALEPFMKSVSSSSPSPSPSPSPSSLPSTSYLSFSSSETQPNFYPDSCCYPYPTPMDSVSCPQQPQTGSTIGLNSLTQAQIHQIQLQFHLHNNQPSYLCQSPQPNTISANSNPMVSFLCPKPVPMKHVGAPSKPTKLYRGVRQRHWGKWVAEIRLPRNRTRLWLGTFDTAEEAALAYDKAAYKLRGDFARLNFPNLRHHGSHVGDYKPLPSSVDAKLQAICESLVQNPKQGSKKKSSKVTADTKSRNNKKSDMAEPKPEENTAKVENSSSLSTVQSESEGSAVSSPLSDLTFSDFDEQPWPEVVSSSETFMLSKYPSEIDWDSILKA

SEQ ID NO: 281 - DNA, 993 bp, Arabidopsis thaliana
atgaatttgtacacttgtagcagatcgtttcaagactctggtggtgaactcatggacgcgcttgtaccttttatcaaaagcgtttccgattctccttcttcttcttctgcagcgtctgcgtctgcgtttcttcacccctctgcgttttctctccctcctctccccggttattacccggattcaacgttcttgacccaaccgttttcatacgggtcggatcttcaacaaaccgggtcattaatcggactcaacaacctctcttcttctcagatccaccagatccagtctcagatccatcatcctcttcctccgacgcatcacaacaacaacaactctttctcgaatcttctcagcccaaagccgttactgatgaagcaatctggagtcgctggatcttgtttcgcttacggttcaggtgttccttcgaagccgacgaagctttacagaggtgtgaggcaacgtcactggggaaaatgggtggctgagatccgtttgccgagaaatcggactcgtctctggcttgggacttttgacacggcggaggaagctgcgttggcctatgataaggcggcgtacaagctgcgcggcgatttcgcccggcttaacttccctaacctacgtcataacggatctcacatcggaggcgatttcggtgaatataaacctcttcactcctcagtcgacgctaagcttgaagctatttgtaaaagcatggcggagactcagaaacaggacaaatcgacgaaatcatcgaagaaacgtgagaagaaggtttcgtcgccagatctatcggagaaagtgaaggcggaggagaattcggtttcgatcggtggatctccaccggtgacggagtttgaagagtccaccgctggatcttcgccgttgtcggacttgacgttcgctgacccggaggagccgccgcagtggaacgagacgttctcgttggagaagtatccgtcgtacgagatcgattgggattcgattctagcttag

SEQ ID NO: 282 - protein, 330 aa, Arabidopsis thaliana
MNLYTCSRSFQDSGGELMDALVPFIKSVSDSPSSSSAASASAFLHPSAFSLPPLPGYYPDSTFLTQPFSYGSDLQQTGSLIGLNNLSSSQIHQIQSQIHHPLPPTHHNNNNSFSNLLSPKPLLMKQSGVAGSCFAYGSGVPSKPTKLYRGVRQRHWGKWVAEIRLPRNRTRLWLGTFDTAEEAALAYDKAAYKLRGDFARLNFPNLRHNGSHIGGDFGEYKPLHSSVDAKLEAICKSMAETQKQDKSTKSSKKREKKVSSPDLSEKVKAEENSVSIGGSPPVTEFEESTAGSSPLSDLTFADPEEPPQWNETFSLEKYPSYEIDWDSILA

SEQ ID NO: 283 - DNA, 1825 bp, Arabidopsis thaliana
atcggtgaggttgagagtaattcactacacacacacaaaaaataaattgagtgcctcccccaaaaacaaaattggtagataacgagcaattgttttttttcagatttgatcctgaatttttacatttttttttttgcaatctccccctaatctgttgtttctcgcttcttcttctgttaatcatctgtctttcaaaaagaaagaaaaaagaaaaattcgatttctgggtttgtttttgtcatacagaaaaaaatcaagcttatgaatttgtgtttaattttttgttttaatttgaaaggcaggttttttcagaacgagatcgttttttcaaatttcttctgattttacctctttttttcttcttagattttagtgaatcgagggtgaaatttttgattccctcttttcggatctacacagaggttgcttatttcaaaccttttagatccatttttttttaattttctcggaaaaatccctgtttctttacttttttataagtctcaggttcaattttttcggattcaaatttttattttaaatggcagctgctatgaatttgtacacttgtagcagatcgtttcaagactctggtggtgaactcatggacgcgcttgtaccttttatcaaaagcgtttccgattctccttcttcttcttctgcagcgtctgcgtctgcgtttcttcacccctctgcgttttctctccctcctctccccggttattacccggattcaacgttcttgacccaaccgttttcatacgggtcggatcttcaacaaaccgggtcattaatcggactcaacaacctctcttcttctcagatccaccagatccagtctcagatccatcatcctcttcctccgacgcatcacaacaacaacaactctttctcgaatcttctcagcccaaagccgttactgatgaagcaatctggagtcgctggatcttgtttcgcttacggttcaggtgttccttcgaagccgacgaagctttacagaggtgtgaggcaacgtcactggggaaaatgggtggctgagatccgtttgccgagaaatcggactcgtctctggcttgggacttttgacacggcggaggaagctgcgttggcctatgataaggcggcgtacaagctgcgcggcgatttcgcccggcttaacttccctaacctacgtcataacggatctcacatcggaggcgatttcggtgaatataaacctcttcactcctcagtcgacgctaagcttgaagctatttgtaaaagcatggcggagactcagaaacaggacaaatcgacgaaatcatcgaagaaacgtgagaagaaggtttcgtcgccagatctatcggagaaagtgaaggcggaggagaattcggtttcgatcggtggatctccaccggtgacggagtttgaagagtccaccgctggatcttcgccgttgtcggacttgacgttcgctgacccggaggagccgccgcagtggaacgagacgttctcgttggagaagtatccgtcgtacgagatcgattgggattcgattctagcttaggggcaaaataggaaattcagccgcttgcaatggagtttttgtgaaattgcatgactggcccaagagtaattaattaaatatggattagtgttaaatttcgtatgttaatatttgtattatggtttgtattagtctctctgtgtcggtccagcttgcggttttttgtcaggctcgaccatgccacagttttcattttatgtaatctttttttcttttgtcttatgtaatttgtagcttcagtttcttcatctataatgcaattttattatgattatgtaa

SEQ ID NO: 284 - protein, 334 aa, Arabidopsis thaliana
MAAAMNLYTCSRSFQDSGGELMDALVPFIKSVSDSPSSSSAASASAFLHPSAFSLPPLPGYYPDSTFLTQPFSYGSDLQQTGSLIGLNNLSSSQIHQIQSQIHHPLPPTHHNNNNSFSNLLSPKPLLMKQSGVAGSCFAYGSGVPSKPTKLYRGVRQRHWGKWVAEIRLPRNRTRLWLGTFDTAEEAALAYDKAAYKLRGDFARLNFPNLRHNGSHIGGDFGEYKPLHSSVDAKLEAICKSMAETQKQDKSTKSSKKREKKVSSPDLSEKVKAEENSVSIGGSPPVTEFEESTAGSSPLSDLTFADPEEPPQWNETFSLEKYPSYEIDWDSILA

SEQ ID NO: 285 - DNA, 1224 bp, Arabidopsis thaliana
aaaaaacaaatatttagaaacaaaaaatgctataattcttcctttttcttgttctttcagagattttgatttctattcaatcgactaagagggtgtgtttttaatccctctctgttttaattttgtttcctagtctttaaagatccatggcagccatagatatgttcaatagcaacacagatccttttcaagaagagctcatgaaagcacttcaaccttataccaccaacactgattcttcttctcctacgtattcaaacacagtcttcggtttcaatcaaaccacatctctcggtctaaaccagctcacaccttaccaaatccaccaaatccaaaaccagcttaaccagagacgtaacataatctctccaaatctagccccaaagcctgtcccaatgaagaacatgaccgctcagaaactctatagaggagttagacaaaggcactggggaaaatgggtagctgagatccgtttacccaagaaccggacccgactctggcttggaactttcgacacagctgaagaagcagccatggcttatgacctagctgcttacaagctaagaggcgagttcgcgagacttaatttcccacagttcagacacgaggatggatactacggaggaggtagctgtttcaatcctcttcattcctctgtcgacgcaaagctccaagagatttgtcagagcttgagaaaaacagaggatattgacctcccctgttctgaaacagagcttttcccgccaaaaacagagtatcaagaaagtgaatatgggttcttgagatctgatgagaattcgttttcagatgagtctcatgtggaatcttcttcgccggaatctggtattactacgttcttggacttttcggattctggatttgatgagattgggagtttcgggctggagaagtttccttctgtggagattgattgggatgcgattagcaaattgtccgaatcttaaacaaagcaaagagaagactttttcttttaggagtttgtctttcaatttcagtgtcttatattaatctctctgcaactgaaatttttaacagttgcggagagaatcgtctctagggtttgtttctcttcctccatgttttggtctgactggttaatgtcttttttttttttttgaactttcaaaaacctttgtcattgaccaatcggagaagtttccatgtattctctcatctttaaatttctaatgaagaatgtaaatt

SEQ ID NO: 286 - protein, 272 aa, Arabidopsis thaliana
MAAIDMFNSNTDPFQEELMKALQPYTTNTDSSSPTYSNTVFGFNQTTSLGLNQLTPYQIHQIQNQLNQRRNIISPNLAPKPVPMKNMTAQKLYRGVRQRHWGKWVAEIRLPKNRTRLWLGTFDTAEEAAMAYDLAAYKLRGEFARLNFPQFRHEDGYYGGGSCFNPLHSSVDAKLQEICQSLRKTEDIDLPCSETELFPPKTEYQESEYGFLRSDENSFSDESHVESSSPESGITTFLDFSDSGFDEIGSFGLEKFPSVEIDWDAISKLSES

SEQ ID NO: 287 - DNA, 966 bp, Oryza sativa
atggatcgccaatggcgttgcctcgctgctgcggcttctactagtggtaatagtaagcttcctccgctgccgatggcgctgggcggcgccgtggagtacgggcagctcgtccatggcgcggcggcgcccgtggcgccgttcttcgtggacgccgagcagcagagcctgtcgccggcgacggccatggttcttggcgccgggtggtataactataaccttgtcacgccgtcgcaggcggcgcagctgcaccaccggctgcgacgggcggtgggcgcggcgccgtgctcgatgaagcggtgcggtggcatggcggcggcggcggcggggcggcttgcgctggtggggccggcgccggtgcaggcgaagctgtaccgcggcgtgcggcagcggcactgggggaaatgggtggcggagatccggctgccgcggaaccggacgcggctgtggctgggcacgtacgacaccgccgaggacgccgcgctcgcctacgacggtgccgcgttccggctgcgcggcgacgccgcccgcctcaacttccccgagctccggcgcggagggcggcaccacgcgccggcgctcagcgcgtccgtcgacgccaagatcctccaagccaccaccaccaccacggcggacaccgccgccgccgcagcaccggcgtcgacgaacaccacgccgccgccgtcgccgcgcgtcgtcaagaccgagccgggctgctgctccgtctccgaagcctccacgacgacgacggccgacgccgccgacgtctcgtccacagggtcttccccatccccgacctcatcgaatcaggccgccaccgccacgccgccggcgccgcggccgccgccgccgttgccggagacgattcagcagctggacttcacggaggcgccatgggacgaggccgacggcttcgcgctgcgccggtatccgtcgtgggagatcgactgggacgccatcctctcctga

SEQ ID NO: 288 - protein, 321 aa, Oryza sativa
MDRQWRCLAAAASTSGNSKLPPLPMALGGAVEYGQLVHGAAAPVAPFFVDAEQQSLSPATAMVLGAGWYNYNLVTPSQAAQLHHRLRRAVGAAPCSMKRCGGMAAAAAGRLALVGPAPVQAKLYRGVRQRHWGKWVAEIRLPRNRTRLWLGTYDTAEDAALAYDGAAFRLRGDAARLNFPELRRGGRHHAPALSASVDAKILQATTTTTADTAAAAAPASTNTTPPPSPRVVKTEPGCCSVSEASTTTTADAADVSSTGSSPSPTSSNQAATATPPAPRPPPPLPETIQQLDFTEAPWDEADGFALRRYPSWEIDWDAILS

SEQ ID NO: 289 - DNA, 1384 bp, Broussonetia papyrifera
caccacaccagttttctctgatccctttagagaagagctcatgaaagcacttgaaccttttatgaaaagtgctcataataatatcaacaacaacatttcaccaatctcttcttcttcctcttcttcttacctttctagtgagcccaacttttaccctgaatctgaaacttgctcaccttcaactacccaaatgttttccagtgggttgttctccagctttaaccacatgggttctgagcagactggttctttaggcttaaaccagctcacccaatcccagattctccaaattcaagcccaaatctacttccaacaacaacagcaacagcaacaaaatctactcatgaccaccataactccgccccaaaacagcctcaactacctcggtccgagggcggttccgatgaagaacgtcggcgccaattcaaagcccaacaaactctacagaggagtgaggcagaggcattggggcaaatgggtcgccgagatcagactccccaagaaccggacccgcctctggctgggcaccttcgacaccgccgaggaagccgccttggcctacgacaaggcggcgtacaagctccgcggggacttcgcccgcctcaacttcccccacctccgccacgaaggcgcccacgtctctggcgagttcggcgagtacaagcccctccattcctccgtcgacgccaagcttcaggcgatttgccaaagcctggcgaattcgcagaagcaggggagtgccaaggaggcttgttccgagccggaggtgaagccagtcatcgagcccaagatggcgtccgataattctccgaaaggcgaattggaggtgtcgtcttcgtcgttgtcgtcgtcgtcgtcgttgtcgttgtcgttgtcgttgtcgtcgccgttgtcggatgagtcttcggcggggtcatcctcgccggagtccgatgtcacgttgttggacttctcggattctcattgggatgggaatgagaattttgggctagggaagtacccttcagtggagatcgactgggatgctctgtgatcgtaataaatgttggttatgttgtcattttctcttttttatttttcctgcgttattagttgtttttaaggtttttttttttagttgtacaagcacggcttctgcgatggaatttttaacatggcaggggtttagctcagttttttaaatttaggaagggtcagtaagtcagtcagtcagtcagatgtttttatgttgtaatatttgatgtcgtttgatatctcctatgttggtcagctggtagtttttttccttgctaggcctggccatgggagatctctctgggttgtatttactactttttgaatgtaattaggcaagtctactttatataaaaaaaaaaaaaaaaaa

SEQ ID NO: 290 - protein, 330 aa, Broussonetia papyrifera
MKALEPFMKSAHNNINNNISPISSSSSSSYLSSEPNFYPESETCSPSTTQMFSSGLFSSFNHMGSEQTGSLGLNQLTQSQILQIQAQIYFQQQQQQQQNLLMTTITPPQNSLNYLGPRAVPMKNVGANSKPNKLYRGVRQRHWGKWVAEIRLPKNRTRLWLGTFDTAEEAALAYDKAAYKLRGDFARLNFPHLRHEGAHVSGEFGEYKPLHSSVDAKLQAICQSLANSQKQGSAKEACSEPEVKPVIEPKMASDNSPKGELEVSSSSLSSSSSLSLSLSLSSPLSDESSAGSSSPESDVTLLDFSDSHWDGNENFGLGKYPSVEIDWDAL

SEQ ID NO: 291 - DNA, 993 bp, Jatropha curcas
ggactcagatagttgctccacatcgactgcccttccattttcaaatgggttctcgatccaagaccccaaccgtcttcagcaacctacttgttcaatcgggctatgtcttactccaacccagatccaccagatccagacccaaatccattaccagaatcaaaatggattcaatttccagaatttccacacccaaaaccaacatggcttaactttttaggtccgaaacccgtgcccatgaagcaggtgggttcaccaccaaaacccactaagctctacagaggagtaaggcagcgacattggggcaaatgggttgccgagatccgactacccaagaaccgtacacgactctggcttggtacttttgacacagcagaagaagccgctttagcttatgacaaagcggcgtacaaactccgtggcgacttcgcgagacttaacttccctaacctccgccaccaagggtcccacattgaaggcagcttcggcgagtataagcctctccattcctcggtcgatgcgaaactgcaagctatttgtcaaagcttagcagaatcgcagaaacaaggaggaaaagcagagaagcaatcaaactcgtcagcgaaaaagaagacttcggtggggactactccagcgacggcggagaaggttaaggaagctaaggcaccgcaacaggttgttccggacaagtgttgcaaggtcgagacaccatcgtcagtgttgacagaaagtgaagcctctggcggatcttcaccgttgtcggatcttacgtttccggatctagaagaggcaccattggatgttgattctggaaattttaatttggagaagtacccatcttatgaaattgattgggcttctcttttatcttcttagatttggttatgttatgttatttatcttttatctttattttgcagttatgtttagttcttaggcgtgtggttgctgcaatgagtttttggcagttgcagagccaaaaaaaaaaaaaaaaaa

SEQ ID NO: 292 - protein, 256 aa, Jatropha curcas
MSYSNPDPPDPDPNPLPESKWIQFPEFPHPKPTWLNFLGPKPVPMKQVGSPPKPTKLYRGVRQRHWGKWVAEIRLPKNRTRLWLGTFDTAEEAALAYDKAAYKLRGDFARLNFPNLRHQGSHIEGSFGEYKPLHSSVDAKLQAICQSLAESQKQGGKAEKQSNSSAKKKTSVGTTPATAEKVKEAKAPQQVVPDKCCKVETPSSVLTESEASGGSSPLSDLTFPDLEEAPLDVDSGNFNLEKYPSYEIDWASLLSS

SEQ ID NO: 293 - DNA, 969 bp, Arabidopsis thaliana
tcttcctccgacgcatcacaacaacaacaactctttctcgaatcttctcagcccaaagccgttactgatgaagcaatctggagtcgctggatcttgtttcgcttacggttcaggtgttccttcgaagccgacgaagctttacagaggtgtgaggcaacgtcactggggaaaatgggtggctgagatccgtttgccgagaaatcggactcgtctctggcttgggacttttgacacggcggaggaagctgcgttggcctatgataaggcggcgtacaagctgcgcggcgatttcgcccggcttaacttccctaacctacgtcataacggatttcacatcggaggcgatttcggtgaatataaacctcttcactcctcagtcgacgctaagcttgaagctatttgtaaaagcatggcggagactcagaaacaggacaaatcgacgaaatcatcgaagaaacgtgagaagaaggtttcgtcgccagatctatcggagaaagtgaaggcggaggagaattcggtttcgatcggtggatctccaccggtgacggagtttgaagagtccaccgctggatcttcgccgttgtcggacttgacgttcgctgacccggaggagccgccgcagtggaacgagacgttctcgttggagaagtatccgtcgtacgagatcgattgggattcgattctagcttaggggcaaaataggaaattcagccgcttgcaatggagtttttgtgaaattgcatgactggcccaagagtaattaattaaatatggattagtgttaaatttcgtatgttaatatttgtattatggtttgtattagtctctctgtgtcggtccagcttgcggttttttgtcaggctcgaccatgccacagttttcattttatgtaatctttttttcttttgtcttatgtaatttgtagcttcagtttcttcatctataatgcaattttattatgattatgtg

SEQ ID NO: 294 - protein, 229 aa, Arabidopsis thaliana
LPPTHHNNNNSFSNLLSPKPLLMKQSGVAGSCFAYGSGVPSKPTKLYRGVRQRHWGKWVAEIRLPRNRTRLWLGTFDTAEEAALAYDKAAYKLRGDFARLNFPNLRHNGFHIGGDFGEYKPLHSSVDAKLEAICKSMAETQKQDKSTKSSKKREKKVSSPDLSEKVKAEENSVSIGGSPPVTEFEESTAGSSPLSDLTFADPEEPPQWNETFSLEKYPSYEIDWDSILA

SEQ ID NO: 295 - DNA, 1407 bp, Oryza sativa
cttggttaggttgcttgcagagagcgagagacccagggccttttagatccagggctcccagatctgctgtttttctttcatcttctttgtgttctagtgttaggttggtagccaagaggggttctttttccacacctcacttgctagatctaccaccaaaaagccatctgtttttttactgtggctgtcgatttctccctccttcctgcctgttcttgattttggattcggaaccaggcaaatctttgttactactgttttagtatcagaaaaaaaaatcccaaaaaaaagagtgagtagatggctgcagctatagatctgtcaggggaggagctgatgagagcactcgagccttttatccgagatgcctccggctcgcctccggtttgttcccagtttagtcccacctcgccattctccttcccgcacgcgttcgcgtacggtggcgggctggcccagcagccagagctcagcccggcccagatgcactacatccaggcccgcctccacctccagcggcaggcggcgcaggccggcccgctcggcccgcgcgcgcagccgatgaaggcgtcgtcgtcgtcggcttcggcggcgggggcggcggcgacgccgccgcggccgcagaagctgtaccgcggcgtgcggcagcggcactgggggaagtgggtggcggagatccgcctcccgcggaaccgcacgcggctctggctcggcaccttcgacacagccgaggaggcggcgcttgcctacgaccaggcggcgtaccgcctccgcggcgacgcggcgcggctcaacttccccgacaacgccgcctcccgcggcccgctccacgcctccgtcgacgccaagctccagacgctctgccagaacatcgccgccgccaagaacgccaagaagtcctctgtctccgcctccgccgccgcaacatcctccgcgcccaccagcaactgctcgtcgccgtcctccgacgacgcgtcgtcctgcctggagtccgccgactcgtcgccctccctgtcgccgtcctccgccgccaccacggccgagacgccggcgaccgtgccggagatgcagcagctcgacttcagcgaggcgccgtgggacgaggccgccgccttcgccctcaccaagtacccgtcctacgagatcgactgggactccctcctcgccgccaattaacaccaccaccacttcttggctagtactcacgccgtcgttagcctaatcgtcgccgccgccgccgccgtgcagatgggattttagacattctgcaccgcacggacgggcatggattagcagttttatagtccctaatccttttggtttggttcgtttgtgtacgtagatcgatctctctccggacttgtttcctctgtagatgctagggttggttggtgttcttcctcaacc

SEQ ID NO: 296 - protein, 291 aa, Oryza sativa
MAAAIDLSGEELMRALEPFIRDASGSPPVCSQFSPTSPFSFPHAFAYGGGLAQQPELSPAQMHYIQARLHLQRQAAQAGPLGPRAQPMKASSSSASAAGAAATPPRPQKLYRGVRQRHWGKWVAEIRLPRNRTRLWLGTFDTAEEAALAYDQAAYRLRGDAARLNFPDNAASRGPLHASVDAKLQTLCQNIAAAKNAKKSSVSASAAATSSAPTSNCSSPSSDDASSCLESADSSPSLSPSSAATTAETPATVPEMQQLDFSEAPWDEAAAFALTKYPSYEIDWDSLLAAN

SEQ ID NO: 297 - DNA, 1657 bp, Oryza sativa
aacccaaacgacggagacccactactccgagccatcaagaacacacacacatccagaaagcctaatccaatccaaaagccctaatcacccagactccatctctgtgaggtttgagagaggtaggtgagccgtagatctgagcgagttcttgggtcttccagcaggtagatcacttcatctgaggatcaatctttttttttttcctttgtttttgagcttctgttggtgtacaggacagagagttccagagccttttagtttctggtgttctgatctgttcttggtgtaagattattggtctgatttggtagccaagagggttaattttttccacacctccttgtgctagttagcttagcttataccccccttgtaaagtgattagtagatctagaacttctcttttcgtctgccagttcttggattttggaaagaacaggtggtttgttattcagatttttaggttagaaaaaatccacaaaaaaaaagatattcgatggcagctgctatagaaggaaatctgatgcgggcgctgggagaggctccgtcgccgcagatgcagaagatcgcgccgccgccgtttcatcccggcttgccgccggcgccggcgaacttctcctcggccggagtccacgggttccactacatgggcccggcccagctcagcccggcccagatccagcgcgtccaggcccaactccacatgcagcggcaggcccagtcggggctcggcccgcgggcccagcccatgaagcccgcttcggcggctgctccggcggcggcggcggcgcgggcgcagaagctgtaccgcggcgtgcggcagcggcactggggcaagtgggtggcggagatccggctgccgcgcaaccgcaccaggctctggctcggcaccttcgacaccgccgaggaggcggcgctcacctacgaccaggccgcgtaccgcctccgcggcgacgcggcgcggctcaacttcccggacaacgccgcgtcgcggggcccgctcgacgccgccgtggacgccaagctccaggccatctgcgacaccatcgccgcgtccaagaacgcctcatccaggtccaggggcggcgccggcagggccatgcccatcaacgcgcccctggtcgccgcggcgtcgtcgtcctccggctccgaccactccggcggcggcgacgacggcggctcggagacgtcgtcgtcgtctgcggcggcgtcgccgctggcggagatggagcagctggacttcagcgaggtgccgtgggacgaggcggaggggttcgcgctcaccaagtacccgtcgtacgagatcgactgggactcgctgctcaacaacaataactagctcttctcttccatagcccgccattgccggccggcgcagatgaggttttaggcattctgcgcggcggcgaggcgatggattatatgttcgttcttgtgtagatccttttctttttgtgttggttttttaggttccggaggctgctcgccggcgtcgtttttgtgtccggcgtctccgatgtctagtaagcagtgactcgttagtgtagtagttgtacaactctacaaatgtacaaatacttgtgcatgtaggttgttgtaatcaattgttggtaactacctgtaatagaactactgtgaattaactgtattaatgtgc

SEQ ID NO: 298 - protein, 280 aa, Oryza sativa
MAAAIEGNLMRALGEAPSPQMQKIAPPPFHPGLPPAPANFSSAGVHGFHYMGPAQLSPAQIQRVQAQLHMQRQAQSGLGPRAQPMKPASAAAPAAAAARAQKLYRGVRQRHWGKWVAEIRLPRNRTRLWLGTFDTAEEAALTYDQAAYRLRGDAARLNFPDNAASRGPLDAAVDAKLQAICDTIAASKNASSRSRGGAGRAMPINAPLVAAASSSSGSDHSGGGDDGGSETSSSSAAASPLAEMEQLDFSEVPWDEAEGFALTKYPSYEIDWDSLLNNNN

SEQ ID NO: 299 - DNA, 835 bp, Lycopersicon esculentum
gtttgttccacttccacagagatgaattcccaaatcttttcaactgggttttctgggtatggaatggagcaacagggttcaattgggctgaatcagttaaccccaattcagatccagcaaattcaagctcaaatcaactttcaaaaccaacaacaacagcagcagcagcagatgatgttacagactgcccatcatgcttccaccatgaatttcttggctccaaagccggttccaatgaagcaatctgggtcgccaccaaaacccacgaagctctacagaggtgttagacaacgccactggggtaagtgggtcgctgagatccgtttgcctaagaaccgaacccgcctttggcttggtacatttgacaccgctgaagaagctgctctggcttacgacaaggcggcgtatatgcttcgtggcgactttgctcgactgaacttccctcaactccgccacaacggcaacctaatcggcggcgactttggtgaatacaatccattgcattcctcagttgatgctaagctaaaggacatatgccaaagcttggcacaggggaagagcattgactctaagaagaagaaaaccaaagggttgtcggcggagaaagcggcggtggtgaagatggaggaagaggagagcaaaacagcagaagttggatccgaaagtgacgggtcccattccggttccggtggatcatcgccggtgaccgaactgatattcccggagttcactgaggaagagccaacttgggacatgtcagaaaattttttgttgcagaagtatccatctcatgaaattgattgggcctctctataaaattagaaaataattaaga

SEQ ID NO: 300 - protein, 264 aa, Lycopersicon esculentum
MNSQIFSTGFSGYGMEQQGSIGLNQLTPIQIQQIQAQINFQNQQQQQQQQMMLQTAHHASTMNFLAPKPVPMKQSGSPPKPTKLYRGVRQRHWGKWVAEIRLPKNRTRLWLGTFDTAEEAALAYDKAAYMLRGDFARLNFPQLRHNGNLIGGDFGEYNPLHSSVDAKLKDICQSLAQGKSIDSKKKKTKGLSAEKAAVVKMEEEESKTAEVGSESDGSHSGSGGSSPVTELIFPEFTEEEPTWDMSENFLLQKYPSHEIDWASL

SEQ ID NO: 301 - DNA, 1042 bp, Zea mays
cacgagcaatccccttcaacaaacgcaccgcactccacggcagccagaaaacacatcccacggggcccagacccggcgacccacctgagcccggcgcagatgcagttcatccaggcccagctccacctgcagcggaacccggggctgggcccgcgggcgcagcccatgaagcccgccgtcccagtgccgccggcgccggcgccgcagcggcctgtgaagctgtaccgcggcgtgcggcagcgtcactggggcaagtgggtggccgagatccggctcccccggaaccgcacccgcctgtggctcgggaccttcgacaccgccgagcaggcagcgctggcctacgaccaggcggcgtaccgcctccgcggggacgcggcgcggctcaacttccccgacaacgcggagtccagggcgccgctcgaccccgccgtggacgccaagctgcaggccatctgcgccaccatcgccgccgcgtcgtcgtcatccaagaattccaaggccaagagcaaggcgatgccaatcaacgcgtccgttctggaagcggcagcggcgtctccgagcaacagctcctccgacgaaggttccggctccgggttcgggtcggacgacgagatgtcctcgtcttccccgacgccggtggtggcgccgccggtggcggacatgggacagttggatttcagcgaggttccgtgggacgaggacgagagcttcgtgctccgcaagtacccgtcctacgagatcgactgggacgcgctgctctccaactagtcgcccttcgccgacagatgtgctgttgtagttcagtagtggcagtatctctggccgccgcagatgaggttttaggcaatctgcaggccgccggcccatgtgtattaagtaggttttgctcagttgttggccccggacttcgccggcgtttttgtgaccggcgtccccgagtgcactgcattggtgtactggtctgtctgtaaaaaaaaatggatctgtgtacttctatagtgtgtattcaaccattgttcttaaaaaaaaaaaaaaaaaaaaa

SEQ ID NO: 302 - protein, 222 aa, Zea mays
MQFIQAQLHLQRNPGLGPRAQPMKPAVPVPPAPAPQRPVKLYRGVRQRHWGKWVAEIRLPRNRTRLWLGTFDTAEQAALAYDQAAYRLRGDAARLNFPDNAESRAPLDPAVDAKLQAICATIAAASSSSKNSKAKSKAMPINASVLEAAAASPSNSSSDEGSGSGFGSDDEMSSSSPTPVVAPPVADMGQLDFSEVPWDEDESFVLRKYPSYEIDWDALLSN

SEQ ID NO: 303 - DNA, 926 bp, Oryza sativa
ggaaagaacaggtggtttgttattcagatttttaggttagaaaaaatccacaaaaaaaaagatattcgatggcagctgctatagaaggaaatctgatgcgggcgctgggagaggctccgtcgccgcagatgcagaagatcgcgccgccgccgtttcatcccggcttgccgccggcgccggcgaacttctcctcggccggagtccacgggttccactacatgggcccggcccagctcagcccggcccagatccagcgcgtccaggcccaactccacatgcagcggcaggcccagtcggggctcggcccgcgggcccagcccatgaagcccgcttcggcggctgctccggcggcggcggcggcgcgggcgcagaagctgtaccgcggcgtgcggcagcggcactggggcaagtgggtggcggagatccggctgccgcgcaaccaccccaggctctggctcggcaccttcgacaccgccgaggaggcggcgctcacctacggccaggccgcgtaccgcctccgcggcgacgcggcgcggctcaacttcccggacaacgccgcgtcgcggggcccgctcgacgccgccgtggacgccaagctccaggccatctgcgacaccatcgccgcgtccaagaacgcctcatccaggtccaggggcggcgccggcagggccatgcccatcaatgcgcccctggtcgccgcggcgtcgtcgtcctccggctccgaccactccggcggcggcgacgacggcggctcggagacgtcgtcgtcgtctgcggcggcgtcgccgctggcggagatggagcagctggacttcagcgaggtgccgtgggacgaggcggaggggttcgcgctcaccaagtacccgtcgtacgagatcgactgggactcgctgctcaacaacaataactagctcttctctccatag

SEQ ID NO: 304 - protein, 280 aa, Oryza sativa
MAAAIEGNLMRALGEAPSPQMQKIAPPPFHPGLPPAPANFSSAGVHGFHYMGPAQLSPAQIQRVQAQLHMQRQAQSGLGPRAQPMKPASAAAPAAAAARAQKLYRGVRQRHWGKWVAEIRLPRNHPRLWLGTFDTAEEAALTYGQAAYRLRGDAARLNFPDNAASRGPLDAAVDAKLQAICDTIAASKNASSRSRGGAGRAMPINAPLVAAASSSSGSDHSGGGDDGGSETSSSSAAASPLAEMEQLDFSEVPWDEAEGFALTKYPSYEIDWDSLLNNNN

SEQ ID NO: 305 - DNA, 1434 bp, Atriplex hortensis
aatttacttacccccaagcccagccccaacaaatgagctactcatacccacctccacttcctagtaatacccttaacaactttctatctcccaagcctgtgaccatgaaaacaactggtgggccgcccaagcccactaagctttatcgtggggttaggcaacgtcactggggtaaatgggttgctgagatccgtttacccaagaacaggacccggctttggttgggtacctttgatacagctgaggaagctgctttggcttacgacaaggcggcttacaagctgagaggtgactttgcgaggttgaattttcctaatctccgccatgaagggtcccacatcggtggcgaattcggcgaatacaaaccccttcattcctccgtaaacgcaaaactcgaagccatttgcgagagtctagccaaacaggggaatgaaaaacaggggaaatcaggaaagtccaagaagaaagatgttgctaataataacaataatacttcatcttcgtcatcttcaagctgttgtacaacagctactgctgcggccgatgcaccgcagcagcagcagcggatgccggaaaacggcggcgatgtaaaaaccgagagcacctccgatagtgaggtggggtccggtggatcgtcgccgttgtcggatttgacattcggagataatgaagaaatgggatcggagaatttcttgttggagtcatgcccatctcatgagattgattgggatgctatattatcatctgaatcttaataatttcatttgtggtcttaagtatgggttaataaggagtattaattaaattaaattagggagttataaaatgtgtcatcataatataagtcatgtaatgttgtgtaaattttttctttttttttttttaattttaattaaaattagtaggttggtagtgggtagtttcagggaggagtgatctctgcaatgaagtttttggaaattgtagggactccatatttggtcttctttggtgaggcaagtgtttttttgatcttgcctttgatcaattgaagagtagtttttttttcttattgtttattttatgtttatagtagaaaaaattttaggattgtaatttgatgatcatttttagtgaagtattattattaatatttttattagtataaaaaaaaattggactgttatcaaggtaagtgcttattttgacttccatatttgtatgttgctctctttctttgattctttcatatttctagtgagatctgaactataattaatatggattaaaccttaaattactagtggtttgtgtaacaggatatgcttgatgttcctgttttatacataatcggagcttttgtccctgcaacaatgattgcagtgctctattattttgatcacagtgtggcatctcaacttgctcagcagcgacagcaacggaattcggccctcg

SEQ ID NO: 306 - protein, 240 aa, Atriplex hortensis
MSYSYPPPLPSNTLNNFLSPKPVTMKTTGGPPKPTKLYRGVRQRHWGKWVAEIRLPKNRTRLWLGTFDTAEEAALAYDKAAYKLRGDFARLNFPNLRHEGSHIGGEFGEYKPLHSSVNAKLEAICESLAKQGNEKQGKSGKSKKKDVANNNNNTSSSSSSSCCTTATAAADAPQQQQRMPENGGDVKTESTSDSEVGSGGSSPLSDLTFGDNEEMGSENFLLESCPSHEIDWDAILSSES

SEQ ID NO: 307 - DNA, 1507 bp, Arabidopsis thaliana
aacaagagccaagctaatgagataagtgtatcggtgaggctgagagttattcacttacaaaaaaaaaaaaaaacttgagtgtaaccaaaaaaaaaagttgatatactttctggttttctccttaacttttattctttacaaatccatcccccttagatctgtttatttcccgctactttgattcatttctgttagtaatctgtctttcgtatagaagaaaactgatttcttggtttgtattttcttaaagagatcaatctttttttatttttgatcttcttgtgtttttttttctttgtagaattaatcgtttgtgagggtatttttttaattccctcctctcagaaatctacacagaggttttttattttataaacctctttttcgattttcttgaaaacaaaaaatcctgttctttactttttttacaagaacaagggaaaaaaatttctttttattagaaatgacaacttctatggatttttacagtaacaaaacgtttcaacaatctgatccattcggtggtgaattaatggaagcgcttttaccttttatcaaaagcccttccaacgattcatccgcgtttgcgttctctctacccgctccaatttcatacgggtcggatctccactcattttctcaccatcttagtcctaaaccggtctcaatgaaacaaaccggtacttccgcggctaaaccgacgaagctatacagaggagtgagacaacgtcactggggaaaatgggtggctgagattcgtttaccgaggaatcgaactcgactttggctcggaacattcgacacggcggaggaagctgctttagcttatgacaaggcggcgtataagctccgaggagattttgcgcggcttaatttccctgatctccgtcataacgacgagtatcaacctcttcaatcatcagtcgacgctaagcttgaagctatttgtcaaaacttagctgagacgacgcagaaacaggtgagatcaacgaagaagtcttcttctcggaaacgttcatcaaccgtcgcagtgaaactaccggaggaggactactctagcgccggatcttcgccgctgttaacggagagttatggatctggtggatcttcttcgccgttgtcggagctgacgtttggtgatacggaggaggagattcagccgccgtggaacgagaacgcgttggagaagtatccgtcgtacgagatcgattgggattcgattcttcagtgttcgagtcttgtaaattagatgttgccataggggtattttagggactttagagctctctgcgatggagtttttggtcattgcagagattttattattattaagggggtttgttatgttaatatcaaataagtttatctactttgatgttaattagtgttaatctctgcgtcggtccaagctgtttttttttggcatgcttcgaccgtgtgagatttcttatgtaatttttgtagttccttgattttcttagttcaagttaaattggcacaaaagaac

SEQ ID NO: 308 - protein, 261 aa, Arabidopsis thaliana
MTTSMDFYSNKTFQQSDPFGGELMEALLPFIKSPSNDSSAFAFSLPAPISYGSDLHSFSHHLSPKPVSMKQTGTSAAKPTKLYRGVRQRHWGKWVAEIRLPRNRTRLWLGTFDTAEEAALAYDKAAYKLRGDFARLNFPDLRHNDEYQPLQSSVDAKLEAICQNLAETTQKQVRSTKKSSSRKRSSTVAVKLPEEDYSSAGSSPLLTESYGSGGSSSPLSELTFGDTEEEIQPPWNENALEKYPSYEIDWDSILQCSSLVN

SEQ ID NO: 309 - DNA, 1296 bp, Arabidopsis thaliana
ataacgagagattttttatatataaaaaataaaggaagcacgagttcaccttaaaaatttgagtttctcttttcttgaccctgaagtttcgttttgatcaatttcacccatttctttgttcgtcgtcttttctttcaaaagggtttcatctttgtattataaaaatccaaactttatatcttcacaagcagcaaagatctctatttcaatcctctcatggaaactgcttctctttctttccctgtcccaaacacgagcttcggtgtaaacaaatctatgcctctcggtctaaaccagctcacaccataccaaattcatcagattcagaaccagcttaaccatagacgtagcacaatctcaaacctctctccaaaccgtatcagaatgaagaacttaacaccttctacctccaaaaccaagaatctctacagaggcgtaaggcaaaggcactgggggaaatgggtcgctgagatccgtttgcccaagaaccggacccgtctctggctcgggacattcgaaaccgccgaaaaagccgccttagcttacgaccaagctgcttttcagctccgtggagatatcgcgaagcttaacttcccaaacctcatacacgaagacatgaatcctctcccttcctctgttgataccaagcttcaagctatctgcaaaagtttgagaaaaacagaggaaatttgctctgtttctgatcaaacaaaggagtactctgtttactctgtttcagataaaacagagcttttcctgccaaaagcagagcttttcttgcctaaaagagagcatttggagacaaatgagctctctaatgagtcaccgagaagcgatgagacctcgttgttggatgagtcgcaggcggaatattcatcgtcggataaaacattcctggatttctcggatactgagtttgaagagattggaagtttcgggcttcggaagtttccttcggtggagattgattgggatgcaattagtaaactggccaattcttaaagtcttctattttatattaatcttctgtgcaactgaaattttcaacaagttgcagatgagtttattaggtttgaatctgtcctagttttctttgttggtcgtatagagttttactatgtagctaatctccatgtttggtttggcttggtaagtttttaaggtcctcgtcatcaacaaaccggagaaagtttatgtattcaaaagctatgtattatatcctcacatctacttatgagagtgagatcaaagtttgtaaaatgaagtcttgatttcttcttttagttctctcttttt

SEQ ID NO: 310 - protein, 261 aa, Arabidopsis thaliana
METASLSFPVPNTSFGVNKSMPLGLNQLTPYQIHQIQNQLNHRRSTISNLSPNRIRMKNLTPSTSKTKNLYRGVRQRHWGKWVAEIRLPKNRTRLWLGTFETAEKAALAYDQAAFQLRGDIAKLNFPNLIHEDMNPLPSSVDTKLQAICKSLRKTEEICSVSDQTKEYSVYSVSDKTELFLPKAELFLPKREHLETNELSNESPRSDETSLLDESQAEYSSSDKTFLDFSDTEFEEIGSFGLRKFPSVEIDWDAISKLANS

SEQ ID NO: 311 - DNA, 1296 bp, Glycine max
ataacgagagattttttatatataaaaaataaaggaagcacgagttcaccttaaaaatttgagtttctcttttcttgaccctgaagtttcgttttgatcaatttcacccatttctttgttcgtcgtcttttctttcaaaagggtttcatctttgtattataaaaatccaaactttatatcttcacaagcagcaaagatctctatttcaatcctctcatggaaactgcttctctttctttccctgtcccaaacacgagcttcggtgtaaacaaatctatgcctctcggtctaaaccagctcacaccataccaaattcatcagattcagaaccagcttaaccatagacgtagcacaatctcaaacctctctccaaaccgtatcagaatgaagaacttaacaccttctacctccaaaaccaagaatctctacagaggcgtaaggcaaaggcactgggggaaatgggtcgctgagatccgtttgcccaagaaccggacccgtctctggctcgggacattcgaaaccgccgaaaaagccgccttagcttacgaccaagctgcttttcagctccgtggagatatcgcgaagcttaacttgccaaacctcatacacgaagacatgaatcctctcccttcctctgttgataccaagcttcaagctatctgcaaaagtttgagaaaaacagaggaaatttgctctgtttctgatcaaacaaaggagtactctgtttactctgtttcagataaaacagagcttttcctgccaaaagcagagcttttcttgcctaaaagagagcatttggagacaaatgagctctctaatgagtcaccgagaagcgatgagacctcgttgttggatgagtcgcaggcggaatattcatcgtcggataaaacattcctggatttctcggatactgagtttgaagagattggaagtttcgggcttcggaagtttccttcggtggagattgattgggatgcaattagtaaactggccaattcttaaagtcttctattttatattaatcttctgtgcaactgaaattttcaacaagttgcagatgagtttattaggtttgaatctgtcctagttttcttgttggtcgtatagagttttactatgtagctaatctccatgtttggtttggcttggtaagtttttaaggtcctcgtcatcaacaaaccggagaaagtttatgtattcaaaagctatgtattatatcctcacatctacttatgagagtgagatcaaagtttgtaaaatgaagtcttgatttcttcttttagttctctctttttc

SEQ ID NO: 312 - protein, 272 aa, Glycine max
MAALMDFYSSSTEFQLHSDPFRGELMEVLEPFMKSPFSTPSPSNSCFLSTSYSPSPNNYSPSLYSNGLSSIPNTTQNLIGFGQGQPTSLVGLNHLTPSQISQIQAQIQIQNHSNTLSFLGPKPIPMKHVGMPPKPTKLYRGVRQRHWGKWVAEIRLPKNRTRLWLGTFDTAEEAALAYDKAAYKLRGDFARLNFPNLRHQGSSVGGDFGEYKPLHSAVDAKLQAICEGLAELQKQGKTEKPPRKTRSKLASPPENDNNNDNNSCKVEAAPPL

SEQ ID NO: 313 - DNA, 977 bp, Arabidopsis thaliana
gtacatttttttttgtatttcaggaaactccgatggcggatctcttcggtggtggccacggcggcgagcttatggaagcacttcaacctttttacaaaagtgcttccacgtctgcttcaaatcctgcgtttgcgtcctcaaacgatgcgtttgcgtctgccccaaacgacctattttcttcttcttcttactataatcctcatgcatctttattcccttcacattccacaacctcttacccggatatttattctggatccatgacctatccatcttcattcgggtcggatcttcaacaacccgaaaactaccaatctcagttccattaccaaaacactatcacttacactcaccaagacaacaacacttgcatgcttaacttcattgagccgagccaaccgggttttatgacccaaccgggtccgagttcgggttcggtttcaaaaccggctaagctctatagaggagtgaggcaaagacattggggaaaatgggtcgcggagatccgtttacccaggaaccgaacccgactttggctcggaacattcgacacggctgaagaagccgcgttggcttatgatcgcgccgcgtttaagcttcgtggtgactcggctcggcttaacttcccagctctccgataccaaaccggctcgtctccgtctgataccggcgaatatggtcctattcaagctgccgtagacgctaaactagaagccatattagctgagccgaagaatcagccgggcaaaacggagaggacgtcgaggaaacgagctaaagccgcggcttcttcagctgagcagccgtcagcgccacaacaacattccgggtcgggtgaaagtgatgggtcgggttcaccgacttcggatgttatggtgcaggagatgtgccaagagccagagatgccatggaatgaaaatttcatgctcggcaagtgtccttcttatgagatagattgggcttcaattttatcgtga

SEQ ID NO: 314 - protein, 314 aa, Arabidopsis thaliana
MADLFGGGHGGELMEALQPFYKSASTSASNPAFASSNDAFASAPNDLFSSSSYYNPHASLFPSHSTTSYPDIYSGSMTYPSSFGSDLQQPENYQSQFHYQNTITYTHQDNNTCMLNFIEPSQPGFMTQPGPSSGSVSKPAKLYRGVRQRHWGKWVAEIRLPRNRTRLWLGTFDTAEEAALAYDRAAFKLRGDSARLNFPALRYQTGSSPSDTGEYGPIQAAVDAKLEAILAEPKNQPGKTERTSRKRAKAAASSAEQPSAPQQHSGSGESDGSGSPTSDVMVQEMCQEPEMPWNENFMLGKCPSYEIDWASILS

SEQ ID NO: 315 - DNA, 1291 bp, Arabidopsis thaliana
aacaaatctctctgtttctcccgctcttgctctgttttctcaaagacaaaagaggacatcgtcgttgactcctcttctctatggctactgctaagaacaagggaaaatcaatcagggtccttggtaccagtgaagcagagaaaaaggatgagatggagttggaggaggagttccagtttagtagcggcaagtataaagattcgggtcctggctcggacatgtggttaggagatgcttcctctacgtctccaagaagtcttaggaagactagaacctttgaccgacataatccctatctcgtatcttcttatgctactcctcagccgccaacaacaactacatgctctgtctcttttcccttttacctccctccagcgattcaaaatcaacaacgatttttacacccgaatgacccttcaggacaaagacagcaacaaatgatctcgtttgatcctcaacaacaggtgcaaccatatgttgcacaacagcagcaacaacaacaacatctattgcagtactggagagacattctgaagctgagtccgagcggaagaatgatgatgatgaacatgttaagacaagaaagcgatctgccactgacgaggccaccggttcaacccttcagcgccaccaagctatatagaggtgtcaggcaacgccactggggaaaatgggttgccgagatccgtaagccacgaaacaggacacgtctctggctagggacattcgatacagcagaagaagccgccatggcctacgaccgcgaggccttcaagttgaggggagagaccgctaggctcaatttccctgaactttttctcaataaacaagagccaactcccgtgcatcagaaacaatgtgagacggggactactagtgaagactcaagcagaagaggagaggatgattcgagcacggcattggcagtaggaggggtgagtgaggagacgggttgggctgaggcatggttcaatgcaattccagaggaatggggacctggaagccctctatgggatgattaccactttcccatttctaaccataaggacgatcttgacgccacacaaaactcttcttctgatacaatttaggacctttgttagaatatagatatgcttagttgtatgactgatctagcttgtgttttttttttgggtggagacagtttttgtcatcttccacattttagattctattttcgaccatcatttttttcttgatcggtgactatgaatctaatggggtcaatcattttcacatataaaacttaagtatttggtgtttgtacttc

SEQ ID NO: 316 - protein, 336 aa, Arabidopsis thaliana
MATAKNKGKSIRVLGTSEAEKKDEMELEEEFQFSSGKYKDSGPGSDMWLGDASSTSPRSLRKTRTFDRHNPYLVSSYATPQPPTTTTCSVSFPFYLPPAIQNQQRFLHPNDPSGQRQQQMISFDPQQQVQPYVAQQQQQQQHLLQYWRDILKLSPSGRMMMMNMLRQESDLPLTRPPVQPFSATKLYRGVRQRHWGKWVAEIRKPRNRTRLWLGTFDTAEEAAMAYDREAFKLRGETARLNFPELFLNKQEPTPVHQKQCETGTTSEDSSRRGEDDSSTALAVGGVSEETGWAEAWFNAIPEEWGPGSPLWDDYHFPISNHKDDLDATQNSSSDTI

SEQ ID NO: 317 - DNA, 1405 bp, Arabidopsis thaliana
atgatcacaccaatacacacacaacactccttaattctcgtatatataaacatttattctccacctattttgtcaaaattaagaacaggcttcattctctggacaaacactcaaaaaacaaacaaaaaaaggaacatggaagatcagtttcctaaaatagaaactagcttcatgcacgacaagctcttgtcttctggaatctacgggttcttgagttcttcgacgccgccacaacttctcggtgttccaatatttttggaaggtatgaaatctcctcttcttcctgcttcttcgactccgagctactttgtgtcgcctcatgatcatgagctcacatcttctattcatccatctccggtagcttctgttccttggaactttctagaatcttttcctcagtctcaacatcctgatcatcatccttctaaacctccaaaccttactttgttccttaaagaaccaaagctactagaactttctcaatccgaaagcaacatgagcccttaccataaatacatcccaaactccttttatcaatcagaccaaaacagaaacgaatgggtagagatcaataaaactctaaccaactatccctcgaaaggttttggaaactattggctaagtaccaccaagactcaacccatgaagtcaaaaacaagaaaggttgttcagacgacgaccccaacaaaactgtatagaggagtgagacaaagacactggggcaaatgggtcgcagagattaggcttccaaggaacagaacccgtgtttggctcggcacttttgaaaccgctgagcaagcagcaatggcttacgatacagcagcttatatccttcgtggcgaattcgcacacctcaactttcctgatcttaaacaccagctcaagtccggttctttgcgatgcatgatcgcctcacttttggagtccaagattcaacagatctcatcttcccaagtaagtaactctccttctcctcctcctccaaaagtgggaacaccggagcaaaagaatcatcacatgaagatggagtcaggagaagacgtgatgatgaagaaacagaaaagccataaggaagtgatggaaggagatggtgtacaattgagtaggatgccttctttggatatggatctcatttgggatgctctctcatttcctcattcttcttgacttcaaattaatatttgtcaaacttattttacttacttctacccttttttatatcaaaagtttccaccaaagaaagaaattcatattatgatgccaagattggtttgcatttggggttgaacacattgtaattcttcttacgaccacataatcaagtggttctcctttttttgtctgctaattaattgttcttttctttgcggttactagtaaccataaaatagaaaagtgtttgttt

SEQ ID NO: 318 - protein, 388 aa, Arabidopsis thaliana
MITPIHTQHSLILVYINIYSPPILSKLRTGFILWTNTQKTNKKRNMEDQFPKIETSFMHDKLLSSGIYGFLSSSTPPQLLGVPIFLEGMKSPLLPASSTPSYFVSPHDHELTSSIHPSPVASVPWNFLESFPQSQHPDHHPSKPPNLTLFLKEPKLLELSQSESNMSPYHKYIPNSFYQSDQNRNEWVEINKTLTNYPSKGFGNYWLSTTKTQPMKSKTRKVVQTTTPTKLYRGVRQRHWGKWVAEIRLPRNRTRVWLGTFETAEQAAMAYDTAAYILRGEFAHLNFPDLKHQLKSGSLRCMIASLLESKIQQISSSQVSNSPSPPPPKVGTPEQKNHHMKMESGEDVMMKKQKSHKEVMEGDGVQLSRMPSLDMDLIWDALSFPHSS

SEQ ID NO: 319 - DNA, 1422 bp, Oryza sativa
atggacgcggtggacagaggcggaggcggaggcggtggaggagcgcgcgggcacgggcggagatggaaggggaagggagtgagcgcggcgatctcctcctccgcggccgagacgcagcagccggtgccagttttagaagacgcgccggcggccgcagcattgctccgtccccagaagaagatccgcagccccgatcgtcgcctccagcgctccatctcctcgctgtcgtcggcccctgcttcccccgactcgtcctctgtctccaaccccatgtctcccccggcgatgtccttgccgaatcagccgccatcgtcgcgacatatatttccgttcgcgtacgatccgtctccgggcgcggcggcaccaaggctcctcccgctgctgcagtactccagcttgtacccgcagcctctgctgccgcagcagcaatcacccttgcagaatcagcaaatgatatcgttcggcagtagccagcagcagcagcagcagcagccgcagtttggggcggcgtctcctctgttcccgccgcagttcttgccgccggaggagcagcagcgcctgctgctgcgctactggagcgaggcgctgaacctgagccccccaggcgtgcgcggcggcgccctgccgccgtcgctgtaccagcacctgctgcgcgcgcctgggccgcccaaactgtaccgcggcgtgcggcagcgccactgggggaagtgggtggcggagatccgcctgccgcggaaccgcaccaggctgtggctcggcacgttcgacaccgccgaggacgcagccatggcgtacgaccgcgaggccttcaagctccgcggcgagaacgcgcggctcaacttccccgacctcttccttggcaaaggccgcaccggcgggagcggacgcaccagcgccagcgccgcggcctcctgctcctcctcctcctcttcggctccgcctacaccggacgagagccacacgcagcaagctcagccgcagccgcagcagcctacagaagagtcatccaacactgaaccgaagcctctgctcttcgtagcagagcaggacggcattccagaacccgagctgaatcctcagctccagacagctgaacaacatggcagcgacggcaacacggccatgttccagccgtcggtgacgtccggcggcatttggggtccggccgacgaggcgtggttcagcgcttgggggccaggaagctccgtctgggactacgacatggacagcgcccacggcctcctcctccagtctcgcttggccggtgagcagaccggcatggactacgcctacaccgcgccggaagtcctcgtggcaccggtgccggcggcagggacagccatggccactgccgcttcctcctctcttcctcctcgtcctccccctccttgccacagtccaaccttcgcatggaaggactaa

SEQ ID NO: 320 - protein, 473 aa, Oryza sativa
MDAVDRGGGGGGGGARGHGRRWKGKGVSAAISSSAAETQQPVPVLEDAPAAAALLRPQKKIRSPDRRLQRSISSLSSAPASPDSSSVSNPMSPPAMSLPNQPPSSRHIFPFAYDPSPGAAAPRLLPLLQYSSLYPQPLLPQQQSPLQNQQMISFGSSQQQQQQQPQFGAASPLFPPQFLPPEEQQRLLLRYWSEALNLSPPGVRGGALPPSLYQHLLRAPGPPKLYRGVRQRHWGKWVAEIRLPRNRTRLWLGTFDTAEDAAMAYDREAFKLRGENARLNFPDLFLGKGRTGGSGRTSASAAASCSSSSSSAPPTPDESHTQQAQPQPQQPTEESSNTEPKPLLFVAEQDGIPEPELNPQLQTAEQHGSDGNTAMFQPSVTSGGIWGPADEAWFSAWGPGSSVWDYDMDSAHGLLLQSRLAGEQTGMDYAYTAPEVLVAPVPAAGTAMATAASSSLPPRPPPPCHSPTFAWKD

SEQ ID NO: 321 - DNA, 1604 bp, Oryza sativa
acgtttggctgcaccctgtctcgcggctgatacgtttgcacaggcgttcagatacagccgatacaccggcggcgctagctgcgtttcttctccgcatggacgctccgtcgtcgccctcgccaccgtcggcgcgacacatcttccccttcgcgtacgaggcctccacgacgacggtgggtgggagcccaaggctccacccgctgtcgtggcagcaatccagcatgtcccagcccgcgtcgccacagcaacagcagcagcagccgttgcagcaccagcagatgatatcgttcggcgcgtcgcctccgtgctcgacgacgcagttcgtcgtcccggagaacgcgcagcagcagcagatgctgctgcggtactggagcgaggcgctgaacctgagcccgcgcggtggccccggtggcgtgccaccgtggctgtaccagcagctgctccgggtcccgccaccgccgcagaagctttaccgcggcgtgcggcagaggcactgggggaagtgggtcgcggagatccgcctgccacggaaccgcacgcggctgtggcttggcaccttcgacaccgccgaggacgccgccatggcgtacgaccgcgaggccttcaagctccgcggcgagaacgcgcggctcaactttccggaccggttccttgggaagggccgcgccggcgggaaaggccgcaccagcgtaagctcctcggccgctgccgccgcgtcgtgctcgtcgtcgtcgctatcgccaccggagacacctgacgacgcaaacacgcagcaacaagctcctcagcagcgagaacagcgggacacggcaggagtgtccatggagaagaaacaaccacagcctccagctccaacctctcgtcaagaagggtgctctggcggcgacgcagctgcgccgtacccggccgaaatgcttcacgcgccggcggcgtgcggcggcatgtgggttgctcccgacgagtcatggttcagcacgtggggccctggcagctccttctgggacgactacgacatggacagcgctcgcggcctcttcctccaccctcgcttcaccggtgacgaaactagcatggatcattccggcacgcaagcaaccgtgccggcagtggcagcaacagcggcagggatgagcatgccatgcgatgatgttccggtaacctcttcttcttcagatctccctccccaagggacacctcagactcctaccttcatgtggaaggaggactaagcatgcatgcacacagccacgcacctcgacgagacgactatctcttccatctcccatcgacttcgacgatctctttcattactcatcgacttcaaccacaaaggtatgattagggtagagatgcttgcagattgcagttttaaagacaattttgcagcatcacacagctctacgtacaacagccacacctatatcaattctcaagacttctaaaccacaagggaacccctgttctaggctgcgatttttaggtcagcttgttggggtgaccacagtacaattccctttatttcgtatcttcccaagattgtgtgtgtcagatattcgttgaactcgacttcaaaagatttgaagtattcatgttttcttttactc

SEQ ID NO: 322 - protein, 377 aa, Oryza sativa
MDAPSSPSPPSARHIFPFAYEASTTTVGGSPRLHPLSWQQSSMSQPASPQQQQQQPLQHQQMISFGASPPCSTTQFVVPENAQQQQMLLRYWSEALNLSPRGGPGGVPPWLYQQLLRVPPPPQKLYRGVRQRHWGKWVAEIRLPRNRTRLWLGTFDTAEDAAMAYDREAFKLRGENARLNFPDRFLGKGRAGGKGRTSVSSSAAAAASCSSSSLSPPETPDDANTQQQAPQQREQRDTAGVSMEKKQPQPPAPTSRQEGCSGGDAAAPYPAEMLHAPAACGGMWVAPDESWFSTWGPGSSFWDDYDMDSARGLFLHPRFTGDETSMDHSGTQATVPAVAATAAGMSMPCDDVPVTSSSSDLPPQGTPQTPTFMWKED

SEQ ID NO: 323 - DNA, 1401 bp, Oryza sativa
atggacgctccgagcggcgagagcggcggcggcggcggcggcggtggtggcaggaggtggaaggggaagggggtgacgcccatacagccgcggcggcagctggggacggttttggaggactcgtcggcggcattgctgcggccgctcaagaagattgggcggagccccgaccgcctcctccgctccgcatcgtcgctctccacgtcctcgtcggctccgccttcgcctcgctcttcttcggcttccgatgctccagtccgcgtcatctcgtcgtcgccgtcgtcgccctcgccaccgtcggcgcgacacatcttccccttcgcgtacgaggcctccacgacgacggtgggtgggagcccaaggctccacccgctgtcgtggcagcaatccagcatgtcccagcccgcgtcgccacagcaacagcagcagcagccgttgcagcaccagcagatgatatcgttcggcgcgtcgcctccgtgctcgacgacgcagttcgtcgtcccggagaacgcgcagcagcagcagatgctgctgcggtactggagcgaggcgctgaacctgagcccgcgcggtggccccggtggcgtgccaccgtggctgtaccagcagctgctccgggtcccgccaccgccgcagaagctttaccgcggcgtgcggcagaggcactgggggaagtgggtcgcggagatccgcctgccacggaaccgcacgcggctgtggcttggcaccttcgacaccgccgaggacgccgccatggcgtacgaccgcgaggccttcaagctccgcggcgagaacgcgcggctcaactttccggaccggttccttgggaagggccgcgccggcgggaaaggccgcaccagcgtaagctcctcggccgctgccgccgcgtcgtgctcgtcgtcgtcgctatcgccaccggagacacctgacgacgcaaacacgcagcaacaagctcctcagcagcgagaacagcgggacacggcaggagtgtccatggagaagaaacaaccacagcctccagctccaacctctcgtcaagaagggtgctctggcggcgacgcagctgcgccgtacccggccgaaatgcttcacgcgccggcggcgtgcggcggcatgtgggttgctcccgacgagtcatggttcagcacgtggggccctggcagctccttctgggacgactacgacatggacagcgctcgcggcctcttcctccaccctcgcttcaccggtgacgaaactagcatggatcattccggcacgcaagcaaccgtgccggcagtggcagcaacagcggcagggatgagcatgccatgcgatgatgttccggtaacctcttcttcttcagatctccctccccaagggacacctcagactcctaccttcatgtggaaggaggactaa

SEQ ID NO: 324 - protein, 466 aa, Oryza sativa
MDAPSGESGGGGGGGGGRRWKGKGVTPIQPRRQLGTVLEDSSAALLRPLKKIGRSPDRLLRSASSLSTSSSAPPSPRSSSASDAPVRVISSSPSSPSPPSARHIFPFAYEASTTTVGGSPRLHPLSWQQSSMSQPASPQQQQQQPLQHQQMISFGASPPCSTTQFVVPENAQQQQMLLRYWSEALNLSPRGGPGGVPPWLYQQLLRVPPPPQKLYRGVRQRHWGKWVAEIRLPRNRTRLWLGTFDTAEDAAMAYDREAFKLRGENARLNFPDRFLGKGRAGGKGRTSVSSSAAAAASCSSSSLSPPETPDDANTQQQAPQQREQRDTAGVSMEKKQPQPPAPTSRQEGCSGGDAAAPYPAEMLHAPAACGGMWVAPDESWFSTWGPGSSFWDDYDMDSARGLFLHPRFTGDETSMDHSGTQATVPAVAATAAGMSMPCDDVPVTSSSSDLPPQGTPQTPTFMWKED

SEQ ID NO: 325 - DNA, 1528 bp, Arabidopsis thaliana
attaaatagatctttaaacaaaaaaaccaaattctacttttctttcaaaaacaatctctcattatctcaatcttactcttgttcaatctcttttgaacttgaaaaaccatcattctatcaaatcaaacacaattgttagggtttctttttatcttatactccacgaaacgtctggttgagaaaaaatggaagaaagcaatgatatttttcagaacaatttcagtcctaaaatctcagaaatcagagcatctctgtctcagatcatattagcaggaggaccaaacacactcgactcaatcttctcacttctcactccctcctccgtagaatccgccacaacatcattcaacactcacaatcctccgccaccgccgcagctcgggtcctccgtctatctccgccaacgagatatcatcgagaagttccaccttcagaacagagcaatctccactcctcatcctcctctgttttcctcaacgtacgatcatcatcaaacttccgagctaatgctccaagcggcggccgggtctccagccgccgctttcgccgctgcgttagcggctgggagggtgacgaaaaagaagaaactttacagaggagtgaggcagagacattggggaaaatgggttgcggagataagattgccgcaaaacagaatgagggtttggttaggtacttacgacacggcggaagccgccgcttacgcttacgatcgcgccgcctataagctccgtggagaatacgctcgtctcaattttcctaatctcaaagacccgagtgagctactcggactcggagattcctctaagctaatagctctcaagaacgccgtcgacgggaagatccaatccatttgccagagagtcagaaaagagagagcaaaaaagagcgtaaaagtgagcaaaaactcgtcggccacggcggattcttcgtgtttgtcatcgccggagattctgtcgtcgtctccggtgacgacaactactactgcggttacttcagaggatagttattgggtttcacctatgggtttgtgtaacagtgaaaatagttctccggtatcagtttcggtccctagtgaagtaccggcgacggcggaggaagaggcaatgatgggagtggacactgatgggtttttattagcgaggatgccatcgttcgatccagagctgatttgggaagttcttgccaattaatactacacaaagaatgtgaattttgatcaaaattgcaacaagaagaagaaaaaaaaaagtttggaattaggacaaaaatgatgagaaaaattagggttttaggtgttaatttagggtttaaagtaaaaccggatcttttgttaaaatcattcgaaagttgttaaataatataattagggtttctcaaatacaatgtaaagcctcgtggtttttgaaagaggttgtgaaagctcctttttttgaatttctgttttagatcatcgaaggactttctttctgattgtacttagaagaacaattatatgttacagtgttaatttaataaaattgagatt

SEQ ID NO: 326 - protein, 335 aa, Arabidopsis thaliana
MEESNDIFQNNFSPKISEIRASLSQIILAGGPNTLDSIFSLLTPSSVESATTSFNTHNPPPPPQLGSSVYLRQRDIIEKFHLQNRAISTPHPPLFSSTYDHHQTSELMLQAAAGSPAAAFAAALAAGRVTKKKKLYRGVRQRHWGKWVAEIRLPQNRMRVWLGTYDTAEAAAYAYDRAAYKLRGEYARLNFPNLKDPSELLGLGDSSKLIALKNAVDGKIQSICQRVRKERAKKSVKVSKNSSATADSSCLSSPEILSSSPVTTTTTAVTSEDSYWVSPMGLCNSENSSPVSVSVPSEVPATAEEEAMMGVDTDGFLLARMPSFDPELIWEVLAN

SEQ ID NO: 327 - DNA, 843 bp, Oryza sativa
atggcagctgctatagaaggaaatctgatgcgggcgctgggagaggctccgtcgccgcagatgcagaagatcgcgccgccgccgtttcatcccggcttgccgccggcgccggcgaacttctcctcggccggagtccacgggttccactacatgggcccggcccagctcagcccggcccagatccagcgcgtccaggcccaactccacatgcagcggcaggcccagtcggggctcggcccgcgggcccagcccatgaagcccgcttcggcggctgctccggcggcggcggcggcgcgggcgcagaagctgtaccgcggcgtgcggcagcggcactggggcaagtgggtggcggagatccggctgccgcgcaaccgcaccaggctctggctcggcaccttcgacaccgccgaggaggcggcgctcacctacgaccaggccgcgtaccgcctccgcggcgacgcggcgcggctcaacttcccggacaacgccgcgtcgcggggcccgctcgacgccgccgtggacgccaagctccaggccatctgcgacaccatcgccgcgtccaagaacgcctcatccaggtccaggggcggcgccggcagggccatgcccatcaacgcgcccctggtcgccgcggcgtcgtcgtcctccggctccgaccactccggcggcggcgacgacggcggctcggagacgtcgtcgtcgtctgcggcggcgtcgccgctggcggagatggagcagctggacttcagcgaggtgccgtgggacgaggcggaggggttcgcgctcaccaagtacccgtcgtacgagatcgactgggactcgctgctcaacaacaataactag

SEQ ID NO: 328 - protein, 280 aa, Oryza sativa; identical to SEQ ID NO: 298

SEQ ID NO: 329 - DNA, 822 bp, Oryza sativa
atggacgccagcctccgcacactgcctccggcgatcttccccggcgaggtccgctccgccgtctcctccctcctcctctctcccggcggcagcgccctcgacaccgtgttctcccacctcccgccgcccgtcaccatcccgccgctcggctccagcgtctactaccgccagagcgagctcctgcgccacttcgccgcgtcgcaggcggcgcaggcgcagagcgccaccgccgccgccagctcttcgtcggccgccgcggcgggtctcgacgatggcgcgccgcggaagctgtaccgcggcgtgcggcagcggcagtgggggaagtgggtggccgagatcaggctgccgcagaaccgggtgcgcgtgtggctcggcacctacgactcgccggagaccgccgcgcacgcctacgaccgcgccgcgttcaagctccgcggcgagtacgcgcgcctcaacttccccggcgtcatggacggccgcgactgccccgacaacctgcgccaactccgcgacgccgtcgacgccaagatccaggccatccgcgtccgcatggcgcgcaagcgcgcgcgcgcgcgccgccagcgcgaggagagcaagaagagccaacgcgccgaggacgcgaaggcggcgacgccgtctcgccccgtggcctccgagcgcgccgcgtccgagacgacgacgacgacaaccacgacgtcgtcgtcgtacgggtcaccggacggcgtgctctccatgagcgcggcgtccgtcgacggcgactgcccgctcgagcggatgccgtcgttcgatcccgagttgatctgggagatgcttaacttctag

SEQ ID NO: 330 - protein, 273 aa, Oryza sativa
MDASLRTLPPAIFPGEVRSAVSSLLLSPGGSALDTVFSHLPPPVTIPPLGSSVYYRQSELLRHFAASQAAQAQSATAAASSSSAAAAGLDDGAPRKLYRGVRQRQWGKWVAEIRLPQNRVRVWLGTYDSPETAAHAYDRAAFKLRGEYARLNFPGVMDGRDCPDNLRQLRDAVDAKIQAIRVRMARKRARARRQREESKKSQRAEDAKAATPSRPVASERAASETTTTTTTTSSSYGSPDGVLSMSAASVDGDCPLERMPSFDPELIWEMLNF

SEQ ID NO: 331 - protein, 34 aa, Artificial sequence
  C-terminal reqion of SEQ ID NO: 2
PFLMQWLNLLPLPVLDSSSWCPEHFHNSESDALP

SEQ ID NO: 332 - protein, 56 aa, Artificial sequence
  AP2 DNA-binding domain
YRGVRQRHWGKWVAEIRLPRNRTRLWLGTFDTAEEAALAYDSAAFRLRGESARLNF

SEQ ID NO: 333 - protein, 17 aa, Artificial sequence
  Motif I
  UNSURE (4)..(4): Xaa can be any naturally occurring amino acid
  UNSURE (6)..(6): Xaa can be any naturally occurring amino acid
  UNSURE (8)..(8): Xaa can be any naturally occurring amino acid
  UNSURE (10)..(10): Xaa can be any naturally occurring amino acid
  VARIANT (15)..(15): /replace ="Tyr"
  VARIANT (16)..(16): /replace ="Glu"
  VARIANT (17)..(17): /replace ="Ser"
RLPXNXRXRXWLGTFDT

SEQ ID NO: 334 - protein, 3 aa, Artificial sequence
  Motif II
  VARIANT (3)..(3): /replace = "Glu"
RGD

SEQ ID NO: 335 - protein, 24 aa, Artificial sequence
  Motif III
WDESESFLLHKYPSLEIDWDAILS

SEQ ID NO: 336 - protein, 17 aa, Artificial sequence
  Motif IV
GPPLHAAVDAKLHAICH

SEQ ID NO: 337 - protein, 23 aa, Artificial sequence
  Motif V
GANYLTPAQVLHVQAQLQRLRRP

SEQ ID NO: 338 - protein, 28 aa, Artificial sequence
  Motif V
VDSKELMGALAPSMVSFSYPCSEQSASS

SEQ ID NO: 339 - DNA, 2194 bp, Oryza sativa
aatccgaaaagtttctgcaccgttttcaccccctaactaacaatatagggaacgtgtgctaaatataaaatgagaccttatatatgtagcgctgataactagaactatgcaagaaaaactcatccacctactttagtggcaatcgggctaaataaaaaagagtcgctacactagtttcgttttccttagtaattaagtgggaaaatgaaatcattattgcttagaatatacgttcacatctctgtcatgaagttaaattattcgaggtagccataattgtcatcaaactcttcttgaataaaaaaatctttctagctgaactcaatgggtaaagagagagattttttttaaaaaaatagaatgaagatattctgaacgtattggcaaagatttaaacatataattatataattttatagtttgtgcattcgtcatatcgcacatcattaaggacatgtcttactccatcccaatttttatttagtaattaaagacaattgacttatttttattatttatcttttttcgattagatgcaaggtacttacgcacacactttgtgctcatgtgcatgtgtgagtgcacctcctcaatacacgttcaactagcaacacatctctaatatcactcgcctatttaatacatttaggtagcaatatctgaattcaagcactccaccatcaccagaccacttttaataatatctaaaatacaaaaaataattttacagaatagcatgaaaagtatgaaacgaactatttaggtttttcacatacaaaaaaaaaaagaattttgctcgtgcgcgagcgccaatctcccatattgggcacacaggcaacaacagagtggctgcccacagaacaacccacaaaaaacgatgatctaacggaggacagcaagtccgcaacaaccttttaacagcaggctttgcggccaggagagaggaggagaggcaaagaaaaccaagcatcctccttctcccatctataaattcctccccccttttcccctctctatataggaggcatccaagccaagaagagggagagcaccaaggacacgcgactagcagaagccgagcgaccgccttctcgatccatatcttccggtcgagttcttggtcgatctcttccctcctccacctcctcctcacagggtatgtgcctcccttcggttgttcttggatttattgttctaggttgtgtagtacgggcgttgatgttaggaaaggggatctgtatctgtgatgattcctgttcttggatttgggatagaggggttcttgatgttgcatgttatcggttcggtttgattagtagtatggttttcaatcgtctggagagctctatggaaatgaaatggtttagggatcggaatcttgcgattttgtgagtaccttttgtttgaggtaaaatcagagcaccggtgattttgcttggtgtaataaagtacggttgtttggtcctcgattctggtagtgatgcttctcgatttgacgaagctatcctttgtttattccctattgaacaaaaataatccaactttgaagacggtcccgttgatgagattgaatgattgattcttaagcctgtccaaaatttcgcagctggcttgtttagatacagtagtccccatcacgaaattcatggaaacagttataatcctcaggaacaggggattccctgttcttccgatttgctttagtcccagaattttttttcccaaatatcttaaaaagtcactttctggttcagttcaatgaattgattgctacaaataatgcttttatagcgttatcctagctgtagttcagttaataggtaatacccctatagtttagtcaggagaagaacttatccgatttctgatctccatttttaattatatgaaatgaactgtagcataagcagtattcatttggattattttttttattagctctcaccccttcattattctgagctgaaagtctggcatgaactgtcctcaattttgttttcaaattcacatcgattatctatgcattatcctcttgtatctacctgtagaagtttctttttggttattccttgactgcttgattacagaaagaaatttatgaagctgtaatcgggatagttatactgcttgttcttatgattcatttcctttgtgcagttcttggtgtagcttgccactttcaccagcaaagttc

SEQ ID NO: 340 - DNA, 1264 bp, Oryza sativa
tcgacgctactcaagtggtgggaggccaccgcatgttccaacgaagcgccaaagaaagccttgcagactctaatgctattagtcgcctaggatatttggaatgaaaggaaccgcagagtttttcagcaccaagagcttccggtggctagtctgatagccaaaattaaggaggatgccaaaacatgggtcttggcgggcgcgaaacaccttgataggtggcttaccttttaacatgttcgggccaaaggccttgagacggtaaagttttctatttgcgcttgcgcatgtacaattttattcctctattcaatgaaattggtggctcactggttcattaaaaaaaaaagaatctagcctgttcgggaagaagaggattttgttcgtgagagagagagagagagagagagagagagagagagagaaggaggaggaggattttcaggcttcgcattgcccaacctctgcttctgttggcccaagaagaatcccaggcgcccatgggctggcagtttaccacggacctacctagcctaccttagctatctaagcgggccgacctagtagccacgtgcctagtgtagattaaagttgccgggccagcaggaagccacgctgcaatggcatcttcccctgtccttcgcgtacgtgaaaacaaacccaggtaagcttagaatcttcttgcccgttggactgggacacccaccaatcccaccatgccccgatattcctccggtctcggttcatgtgatgtcctctcttgtgtgatcacggagcaagcattcttaaacggcaaaagaaaatcaccaacttgctcacgcagtcacgctgcaccgcgcgaagcgacgcccgataggccaagatcgcgagataaaataacaaccaatgatcataaggaaacaagcccgcgatgtgtcgtgtgcagcaatcttggtcatttgcgggatcgagtgcttcacagctaaccaaatattcggccgatgatttaacacattatcagcgtagatgtacgtacgatttgttaattaatctacgagccttgctagggcaggtgttctgccagccaatccagatcgccctcgtatgcacgctcacatgatggcagggcagggttcacatgagctctaacggtcgattaattaatcccggggctcgactataaatacctccctaatcccatgatcaaaaccatctcaagcagcctaatcatctccagctgatcaagagctcttaattagctagctagtgattagctgcgcttgtgatc

SEQ ID NO: 341 - DNA, 1542 bp, Hordeum vulgare
ccgcttcattaaaaactgcccatttttccagttccgacgaggcgcctccccccctccccggcgacgactaggacgaggcaccgccggcaacaaccatgtgcggcggcgcgatcctcaaggacctcaaggtccccgcggtgacgcggaaggtgacggaggcggcgctgtggcccgagaagaagaagcccaggcaggccgacggcggggcccggcgcctcgggctggtcgacggcgaggaggacttcgaggccgacttcgaggagttcgaggccgactccggggactccgacctggagctcgggcgcggccgggcggctgagaaggacgacgacgaggtcgtcgagatcaagccctacgccgccgtcaagaggcccctctcccaagatgacttcagcatcattactactgctggttgtgatggtcctgcacaaaggtcagcaaaaaggaagagaaagaaccaattcaggggtatccgtcagcgcccctggggtaagtgggctgctgaaatcagagatcctagcaaaggtgtccgtgtttggcttggtactttcaacagtgctgaagaagctgcaagagcctacgatgttgaagcacgcaggatccgtggcaagaaggccaaggtaaactttccagaggaaccaacagttcctcagaagcgccgtgttcgccctgctcctcttaaagcacccaagctaagcgcatcacaggaacctaccgtcataccagcagtcaacaaccttgccaacccaaatgctttcgtctacccatctgctgactttgcatcaaaccagccacctgttcagcctgataacgtgccatttgttcctgcaatgaagtttgctgcccctgttgaagctcctgttatgaatatgtactctgaccagggaagcaactcttttggctgttctgacttgggctgggactatgagaccaagactccagatatatcatccgttgctcccatttccaccattgctgaaggagcagaatctgcgcttatccagagcaacacctacaactcagtggtgcctcctgttatggagaacaatgctgtcgattttgaaccttggacgaggtttcttatggatgatggcgtggatgagccgattgacagccttctgaactttggtgtgcctcaggatgtcattagcaacatggacctttggagcttcgatgacatgcccatctgtggagaattatgctgagggattcaaacccctgtatataaagacaaagggaataagactatgggagattgggaagcaccctgttgtcaacttcggctagcatatgcttatgtccaagcttagatgcaaaaaagttgcatcctgagtctcttttgtaatcaacccttttcctagctgactgtcgatgaaccgttgtcatttatgagtctgatgaaccgttgtctttatcttttgtcaacttatatgtcgtcgctaccatttctgaatgtgaatggcatggatctatgtccagtttgctttaaaaaaaaaaaaaaaaaaaaaaaaaaaaaaaaaaaaaaaaaaaaaaaaaaaaaaa

SEQ ID NO: 342 - protein, 369 aa, Hordeum vulgare
MCGGAILKDLKVPAVTRKVTEAALWPEKKKPRQADGGARRLGLVDGEEDFEADFEEFEADSGDSDLELGRGRAAEKDDDEVVEIKPYAAVKRPLSQDDFSIITTAGCDGPAQRSAKRKRKNQFRGIRQRPWGKWAAEIRDPSKGVRVWLGTFNSAEEAARAYDVEARRIRGKKAKVNFPEEPTVPQKRRVRPAPLKAPKLSASQEPTVIPAVNNLANPNAFVYPSADFASNQPPVQPDNVPFVPAMKFAAPVEAPVMNMYSDQGSNSFGCSDLGWDYETKTPDISSVAPISTIAEGAESALIQSNTYNSVVPPVMENNAVDFEPWTRFLMDDGVDEPIDSLLNFGVPQDVISNMDLWSFDDMPICGELC

SEQ ID NO: 343 - DNA, 1489 bp, Zea mays
caccatttcgctcccgcaagcaccgatttgtttactgctctctccgacgcgcggcggcggagctccctacgacgactgaaccatgtgcggcggcgcgatccttgccaacctccgcgagccggcgccgcgccggctcacagagcgggacatctggcagcagaagaagaagcccaagaggggcggcgccggcgggaggcgctcgttcgcggcggaagacgatgaggacttcgaggccgacttcgaggacttcgaagccgactccagtgattcagatttggagctcagggaagggactgacgacgacgtcatcgagatcaagcccttcaccgccaagaggactttctccagagatggcttaagcaccatgactactgctggttagcaaggtcagccaaaaggaagaggaagaatcaatacaggggtatccgccagcgcccttggggtaagtgggctgctgagatcagagatccccagaagggcgttcgtgtttggcttggtactttcaatagtccggaggaagctgcaagagcttatgatgctgaagcgcgcaggattcgtggcaagaaggccaaggttaactttcctgatgcaccagcagttggtcagaagtgccgttctagttcagcttctgctaaagcactcaagtcatgtgttgaacagaagccaattgtcaaaacagatatgaacatccttgccaacacaaatgcacccttctaccaatctgttaactacgcatccaatttatttgttcagcatggcaatatgccatttgttccagcaatgaactctactgtttcttttgatgatcctatcatgaatctgcactctgaccagggaagtaactcccttggctgctcagacttgggctgggagaatgataccaagacaccagacatcacatccattgctcccattcccactattgctgaaggcgatgagtctgtatttgtcaactccaattcaaacagctcgatggtgcctcctgtcctggagaacaatgctgttgatctcactgatgggctgacagatttagaatcctatatgaggtttcttctggatggcggtgcaagtgattcaattgatagccttctgaaccttgatggatcgcaggatgttggtagcaacatggacctctggaccttcgatgacatgcccatcgctggcgatttcttctgaggaatttgaagcttggccataggactatgtacatagggactaggggaataaagactgggagattgggaagcacctgcttggcaccttgggggtagcatatgctcgtgtctagctcagatgcagaagtcgcattctgaaactctttggttatcgacctgttccctattttaactatctctgtatgagagccatttatgagactgaaccattttgttttgctttcttttcgttgttacaatatatggtttaacattatgatttatggatatgtgccaaatatggtgctcaacagtggtcaaacatgccttttaga

SEQ ID NO: 344 - protein, 164 aa, Zea mays
MNILANTNAPFYQSVNYASNLFVQHGNMPFVPAMNSTVSFDDPIMNLHSDQGSNSLGCSDLGWENDTKTPDITSIAPIPTIAEGDESVFVNSNSNSSMVPPVLENNAVDLTDGLTDLESYMRFLLDGGASDSIDSLLNLDGSQDVGSNMDLWTFDDMPIAGDFF

SEQ ID NO: 345 - DNA, 789 bp, Triticum aestivum
gacgaggcaccgccggcaatcatgtgcggcggcgcgatcctcaaggacctcaaggtccccgcgccgacgcggaaggtgacggcggcggtgctgtggcccgagaagaacaagcccaagcgggccgacggcggcgcccggcgcctcgcggggctcggccggcgcggggggctcgggctggacgacggcgacgcggacttcgaggccgacttcgaggagttcgaggccgactccggggactccgaccaggagctcgggcgcgccggggtggctgagaaggacggcgacgacgaggtcgtcgagaccaagcccttcgccgccgtcaagaggtccctctcccaagatgacttaagcaccatgaccactgctggttttgatggtcctgcacaaaggtcagcaaaaaggaagagaaagaacgaattcaggggtatccgccagcgcccctggggtaagtgggctgctgaaatcagagatcctagcaagggtgtccgtgtttggcttggtaccttcaacagtgctgaagaagctgcaagagcttatgatgttgaagcacgaaggatccgtggcaagaaggccaaggttaactttccagaggaaccaacagttcctcagaagcgccgtgcttgccctgctgctcctaaagttcccaagtcaagcgcagcacaggaacctaccgtcataccagcagtcaacaaccttgccaacccaaatgctttcgtctacccgcctgctgactttgcatcaaagcagccacttgttcagcctgacaacgtgccatatgttccctgcaat

SEQ ID NO: 346 - protein, 256 aa, Triticum aestivum
MCGGAILKDLKVPAPTRKVTAAVLWPEKNKPKRADGGARRLAGLGRRGGLGLDDGDADFEADFEEFEADSGDSDQELGRAGVAEKDGDDEVVETKPFAAVKRSLSQDDLSTMTTAGFDGPAQRSAKRKRKNEFRGIRQRPWGKWAAEIRDPSKGVRVWLGTFNSAEEAARAYDVEARRIRGKKAKVNFPEEPTVPQKRRACPAAPKVPKSSAAQEPTVIPAVNNLANPNAFVYPPADFASKQPLVQPDNVPYVPCN

SEQ ID NO: 347 - DNA, 1399 bp, Triticum aestivum
gggacacacacgcagatccgagctaaccaccatcgacgagcgccagcgccagcagccgagccggatcgaccttttcttttttcttttacacagcgggacagagaaaggagtcaggcagccaaagccacccaccgcttttaccaaccgatcgtccgatcggcgttgccgccaccgctagcattgtcggcttcagctccatccaaatccaccgccagcaagcaagccggcgccatgggtctgccgatgaggagggagagggacgcggaggcggagctcaacctgccgccggggttccggttccacccgacggacgaggagctggtggcgcactacctctgcgcgcgcgccgcggggcgccgcccgcccgtgcccatcatcgccgaggtcgacctgtaccgcttcgacccctgggacctgccggagcgcgccctcttcgggcgccgcgagtggtacttcttcacgccgcgggaccgcaagtaccccaacggctcccgccccaaccgcgccgccgggtcgggctactggaaggccacgggcgcggacaagcccgtggagcacgggggccggacggcggggatcaagaaggcgctcgtgttctaccacggcaagccgccgcgcggggtcaagacggagtggatcatgcacgagtaccgcctcgccgaagccggcggcgcccgcgccaagaagtccggcgccggcacgctcaggctggatgactgggtgctgtgccgcctgtacaacaagaagaacgagtgggagaagatgcagcagcagaaggagaaggagagaagaaggcgatggagtcggaggcgtcgctctcgcactcccactccgacacgcggacgccggaatcggagatcgacgacgacccgttcccggagctgggctctctgccggcgttcgacgacatgggcccagccccagcagcagcagcccctgccggcgtcgtcctgcccaaggaggaggtggaggacttcggcgacctcggcggcgacgactggctcgcgggcatcaacctcgacgacctgcagatgccgggggacgccgccgatttctacggctccatgctcgtctcgccgatggccgccaagatggagccggacggcggcttccccttcttctgagatccttcggcgactccggggacgaccggatgcagcgcaacgcaaactgtgtatagttcagattttcttcatggaaccaacaacaacaacaaaaaaagttctgctaatatcttgttctagtggtgtagtgcagaagtagcagcaggcatgattgaagttccattgtagtactgatgttcatcgccacttgatctgtgacaagtgacggcattctttcgtttcttggctgcaaattcttcgttgttcagaatataatttcagatgggtaatgccaa

SEQ ID NO: 348 - protein, 343 aa, Triticum aestivum
MGLPMRRERDAEAELNLPPGFRFHPTDEELVAHYLCARAAGRRPPVPIIAEVDLYRFDPWDLPERALFGRREWYFFTPRDRKYPNGSRPNRAAGSGYWKATGADKPVEHGGRTAGIKKALVFYHGKPPRGVKTEWIMHEYRLAEAGGARAKKSGAGTLRLDDWVLCRLYNKKNEWEKMQQQKEKERRRRWSRRRRSRTPTPTRGRRNRRSTTTRSRSWALCRRSTTWAQPQQQQPLPASSCPRRRWRTSATSAATTGSRASTSTTCRCRGTPPISTAPCSSRRWPPRWSRTAASPSSEILRRLRGRPDAAQRKLCIVQIFFMEPTTTTKKVLLISCSSGVVQK

SEQ ID NO: 349 - DNA, 1262 bp, Hordeum vulgare
tttcatatgcagtagccgtcttctcctcctcctcctcctcctgccttccagctagctcactatcgcatcatccacaccacacctactactcataccgattccgttcccacccgctcgccatcgccatgccaatgggcagcagcagcagcagcgccgccatgccggccctccctcccggcttccgggtccaccccaccgacgaggagctcatcgtccactacctcggcaggcaggccgcgtccatgcccagccccgtgcccatcatcgccgaggtcaacatctacaagtgcaacccatgggacctccccggcaaggccttgcttggggagaacgagtggtacttcttcagcccccgggatcgcaagtaccccaacggcgcgcgcccgaaccgcgccgccgggtccggctactggaaggccaccggcaccgacaagcccatcccgcccagggagagcggcggcaggaccgtcggcatcaagaaggcgctcgtcttctactccggcagggcgcccaggggcgtcaagaccgactggatcatgcacgagtaccgcatcgcccaagccgaccgcacacccggcaagaagggatccctcaagctggacgaatgggtgctgtgccggctgtataacaagaagaacaactgggacaaggtcaaggtggagcaggacatggctgtggtgcagggacagaatggggaggtcatggacgcgctggccaccgacgccatgtccgacagcttccagacgcacgactcctcggagatcgacaacgcctccggcctgcagcagcagcaccacggcttcatggacatggcgcagcggcaggccagggaaggcatggtgacggtcaaggaggacagcgactggttcaccggcctgagtatggacgacctgcagacttgttacatgaacatggggcagatggtgaatccagcggcgatgcctgtgcacgacggcagcggctatctgcagtcgatgaactcgcctcagatgatgagacccatgtggcaaacaatcttgccaccattctgagatggaagaagaaagatatggtgtaaattatgtttgaaatagaagtgattagacaaatacttactttgaactagaaagagatagaaatttcccaggcatgattctgaagatgtggtggtaggcttgtagcagtatttattctttggtttcgatctataaatttggtattctaaacaaacatgtaattttattcccatatcatctcaagtctaagaaaaaaaaaaaaaaaaa

SEQ ID NO: 350 - protein, 301 aa, Hordeum vulgare
MPMGSSSSSAAMPALPPGFRVHPTDEELIVHYLGRQAASMPSPVPIIAEVNIYKCNPWDLPGKALLGENEWYFFSPRDRKYPNGARPNRAAGSGYWKATGTDKPIPPRESGGRTVGIKKALVFYSGRAPRGVKTDWIMHEYRIAQADRTPGKKGSLKLDEWVLCRLYNKKNNWDKVKVEQDMAVVQGQNGEVMDALATDAMSDSFQTHDSSEIDNASGLQQQHHGFMDMAQRQAREGMVTVKEDSDWFTGLSMDDLQTCYMNMGQMVNPAAMPVHDGSGYLQSMNSPQMMRPMWQTILPPF

SEQ ID NO: 351 - DNA, 1564 bp, Triticum aestivum
  misc_feature (1552)..(1552): n is a, c, g, or t
gcagctagaactgcggcgagctgatccagctgagagaactacagcgaggtttgttggatcgccgacccgaccggagatgagcggcggacaggagctgaatctgccgccgggcttccggttccacccgacggacgaggagctggtgacgcactacctctgccgccgctgcgccggcgcgcccatcgccgtccccatcatcaccgagatcgacctctacaagttcgacccctggcagctcccaaagatggcgctgtacggcgagaaggagtggtacttcttctccccgcgggaccgcaagtaccccaacgggtccaggcccaaccgggccgccgggtccggctactggaaggccaccggggccgacaagcccgtgggcacccccaagccgctggccatcaagaaggcgctcgtcttctacgccggcaaggcccccaagggcgagaagaccaactggatcatgcacgagtaccgcctcgccgacgtcgaccgatcccgccccgcaagaagaacagcctcaggttggatgattgggtgctgtgccgcatctacaacaagaagggcggcatggagaagccggcggccgtggaccggaagccggcggccatgggcggctacgggggtggccctggggccatggcgagctccccgccggagcagaagcccgtcatggggatgaacgccaacggcggcggcggcggcgcgcagccgttccgggacttcgcggcgtactacgaccggccgtccgactcgatgccgcggctgcacgcggactcgagctgctcggagcaggtgctgtcgccggagttcccggcggggaggtgcagagccagcccaagatcagcgagtgggagcgctcgttcgcctccggcggcgaccccgtgaacccggcggccggctccatgctcgagcccaacggcggcttcggcggcgacccgctcctccaggacatcctcatgtactggggcaagccgttctaggcagcgaagaaaccgatcggtcggtcgaagcgagtacctcctatccttggcgtttggggcgatgaaacgggcgagccgccattgttgacctgatgaaggggagataaatttaagaagatattagacgggagataagacaaaatcaggtgcttgatgacgacgacgacgacggcgaagatcggaaggtggcggcgatgataccgtgggtccccggcctctcaccagcatgacatgtgaccgacgacgcccaagatgcttcaaagcgttcgccgcattgcatcatcgggcgggcggtcgtgcgctagcaagcatgcatgtgcgtgtatatggatgggtgtacatacatggagatcatgattggttcggtgcaggggttgctgtttcttgattggttagttgtaatatttttttttttttgcgggtgagttgtaagggtttattgataagttgataccataccataccagtgctagccgccgtgcgtggtgctggctagctgtagtccgagtggtagtagtgtaactgtaagccattcatcaaatgaaactgaatatattatctgccctcaaaaaaanaaaaaaaaaaaa

SEQ ID NO: 352 - protein, 199 aa, Triticum aestivum
MSGGQELNLPPGFRFHPTDEELVTHYLCRRCAGAPIAVPIITEIDLYKFDPWQLPKMALYGEKEWYFFSPRDRKYPNGSRPNRAAGSGYWKATGADKPVGTPKPLAIKKALVFYAGKAPKGEKTNWIMHEYRLADVDRSRPARRTASGWMIGCCAASTTRRAAWRSRRPWTGSRRPWAATGVALGPWRAPRRSRSPSWG

SEQ ID NO: 353 - DNA, 1373 bp, Zea mays
cttgacgtctaccagctgcataataacttggttcagaagaagaagatggacgctttcacacatgttcctcccggctttcgtttccaccctaccgacgaggaactcgttgactactaccttaggaaaaaggtagcactgaagaagatagatttggatgtgataaaagatgtggatttgtacaagattgagccttgggatctgcaagaaaagtgcaggattggaagcgaagagcagaacgagtggtacttcttcagccacaaggacaagaagtacccaaccggcactcgcaccaacagagcgacgacggccggtttttggaaggccacggggagagacaagccgatctacgtgaagaactgcctcgtagggatgaggaagacactggttttctacaaaggccgggcgcccaatggacagaagtcagactggatcatgcacgagtatcgcctggagaccaacaacaatggaattccacatgaggaaggatgggttgtatgcagggtgttcaggaagcgactcgcgactgtccaaagaatggtcggggactcgccttactggttcaatgaccacgcggggttcatggcgccggagctcggctcaccgaggcaggcggcgcaccatcagcagaacgtcatgatgtaccacaggcaacagagcagctacagctacccttgcaaggtggagctggagtaccaccacctccttcctcaggagcacttcctgcagcagctccctcagctggagagccccaagctccctgaccttattggccaagtagacactactctccagccagcatgcggccttacacaggagcatggtgcccctcgctacaccatgcaggagcttcaggccgagcctctctatctggcgactggcggggacacagattggcgagctctcgacaagttcatggcgtcccagcttagccacggagacatcacccctaataaggagtcagctaactactccaatccggcactgcaggtgattcagcagtctgaagagaaagaagaggccttggactacgtgtcaacgtcagcctcctgtggaggggacaatgatttgtggaaataacagcgtcaatggtaatacatattcacatacgcactaaatcactggactagtgcattattccctcattacacagttaataacattgaggcgtgctggatgtaatgtaacgtagtatataaagtagccaactgattcatgtgtcatggtatagtagaatggtatgtgcataacaaagtgtaaccgagtaggtcacacgtccatgcataagttggcataatgtctggtgttaataataaggttagctaacagctgaagctaaggagcttcagcacctgatttgacaaaaaaaaaaaaaa

SEQ ID NO: 354 - protein, 343 aa, Zea mays
MDAFTHVPPGFRFHPTDEELVDYYLRKKVALKKIDLDVIKDVDLYKIEPWDLQEKCRIGSEEQNEWYFFSHKDKKYPTGTRTNRATTAGFWKATGRDKPIYVKNCLVGMRKTLVFYKGRAPNGQKSDWIMHEYRLETNNNGIPHEEGWVVCRVFRKRLATVQRMVGDSPYWFNDHAGFMAPELGSPRQAAHHQQNVMMYHRQQSSYSYPCKVELEYHHLLPQEHFLQQLPQLESPKLPDLIGQVDTTLQPACGLTQEHGAPRYTMQELQAEPLYLATGGDTDWRALDKFMASQLSHGDITPNKESANYSNPALQVIQQSEEKEEALDYVSTSASCGGDNDLWK

SEQ ID NO: 355 - DNA, 1361 bp, Helianthus annuus
cttgcttttgtgttgatatgtctaaagaagaagtgaatttgtctgtgaatgtaaatggtcagtctaaagtgcctccagggtttcggttccaccctaccgaagaagagcttcttcattactacttaaggaagaaagtcgcgtatgaaaagatcgatcttgatgttattcgtgatattgatcttaacaagctcgaaccatgggatatcaaagaaaagtgcagaattggatcaaccccgcaaaacgattggtatttttttagccacaaagacaagaaatacccgactggaacgcgtacaaatcgtgcaactgctgcaggtttttggaaagccaccggtcgagataaggtcatttatagtagcatgagaagaatcggtatgaggaagacactcgtgttctataaaggaagagcacctcatggacaaaagtcggattggattatgcacgaatatagactcgatgacaacacgattatctcccaggattatgcctcaggttctaatttatgtgattccactcaagaagacgggtgggtcgtatgtcgcgtttttaaaaagaaaaactaccataaagcggttgagagtccccaaaggtcatcatcagcaccttccattgattcaacagctcaaatgcaatctttaaagaaagatggaactcaacttcttgcatacatcaatggtactaaatcctgcaagcaagaaaccgaatcactcgccaatatagcaaccacccatgactatgaccctttgcaacaattcatcaacccgataagcgacagattcctacacctcccaaggctccacaacacttcaagtgacttgatcacgtcagccacctttgatcaagattcaatctttccggcccataacaccatgactcatttgctaacggaagttgaacattctaggaatcataaacatcttgaaaactggtcagatgtggatcgactcgtggcctcccaactcaatggccaaccgcgatcatccaggcagatgtacggttgctacgacgaacccaatgaagacatatgcttctcacttcaccatgatgatcagcaagaaccaccacaaccatcatccatggctaaacccaaccaagcagcctatacaagcgagatagatatatggagctttgcacaatcttcatcacaatcatcatcaccggatccattttaccatttgtcggtatagttcacataagtaatatactttttactttatggaaaatacagatggaataaactgttatatatacttggatgtatatatagtctctttaattagctgggtgggttatggatcttgatgtgaagtgaaaggtcatgacttatgaatgtattgtgtttgatgcaaaaaaaaaaaaaa

SEQ ID NO: 356 - protein, 389 aa, Helianthus annuus
MSKEEVNLSVNVNGQSKVPPGFRFHPTEEELLHYYLRKKVAYEKIDLDVIRDIDLNKLEPWDIKEKCRIGSTPQNDWYFFSHKDKKYPTGTRTNRATAAGFWKATGRDKVIYSSMRRIGMRKTLVFYKGRAPHGQKSDWIMHEYRLDDNTIISQDYASGSNLCDSTQEDGWVVCRVFKKKNYHKAVESPQRSSSAPSIDSTAQMQSLKKDGTQLLAYINGTKSCKQETESLANIATTHDYDPLQQFINPISDRFLHLPRLHNTSSDLITSATFDQDSIFPAHNTMTHLLTEVEHSRNHKHLENWSDVDRLVASQLNGQPRSSRQMYGCYDEPNEDICFSLHHDDQQEPPQPSSMAKPNQAAYTSEIDIWSFAQSSSQSSSPDPFYHLSV

SEQ ID NO: 357 - DNA, 1820 bp, Glycine max
tcacctcatcatctatcattatatctttctttcaattcctatcctcttccttgtagtgtacccattttgaatgtgttctctctctctctctctttctttaggtccctggtgaatatctagaaccactctctagctagtttctctcttcttgctagctagctatcgccgatcactctcttggtttaaaccacctgaatgccggaaaacatgagcatatcagtgaatggtcaatctcaagtccctcctggcttcaggtttcatccaactgaagaagagcttcttcagtactacttgaggaagaaggtctcttacgagaagattgacctcgacgtgattcgtgacgttgatctcaacaagctcgagccatgggacatacaagagaaatgcaaaataggaaccactccgcagaatgattggtacttcttcagccacaaagacaagaagtaccccacaggaacgcgcaccaatcgcgcaactgctgcagggttctggaaggccactggccgcgacaaagtcatctacagcaatggaaagaggattggaatgagaaagactctggttttctacaaaggaagagcgccacatggccagaaatccgattggatcatgcatgaatacagactagacgacaacaacaccaccgacaccaatattgtgtccaatgtgatgggggatgctgctcaggaagaagggtgggtggtgtgcaggatattcaagaagaagaaccatctgaaaaccctagacagccccttagcttcaggggaagatagaaggagccacttgttcgactcgtgcgacgagggagctttggagcaaatacttcagcaaatgggaaggggttgcaaggaggagagcagctatgaaggcaactacaacagctatggaaggtttacaaggccgtatgagacaacagcggcgaacaatggcggcggatacaatgataggttcatgaagctcccgagcctcgagagcccaaaatccgcaagcatggagaaccaccacaacaccaacaacaacaataacatgaatagtaataataataataatggtgataacaacgagaacaacaataataatgggtaccatcccataattccagtagagatgggcacggacaatgaagggacattcacaacgcaccaggtgagtggtggtgacccaaacaacaacaacaacaacagcaacattgttcatccattggaggtaggatcaggtggtggaggcctcaccaactgggctgcgctggaccgtttagttgcatctcaactcaatggccaaaccgatgcctctaggcaactaggatgtgctttcaacgaccccaccatgtattgcaccagcgtcgaccatcatgatcttcatcatcaaatccccaccctccgatcctcatcaacgtccgctaacacacgaccttcccctgcacccgcattcatcaaccccccaacacaggacttcaccagcgagattgacctttggaacttctcccgatccacgtcctcactgttggcatcctccgaaccactgtgccacgtgtccaacacgtcagtgtagcgagatcaataaaataataatataaaaaaaaatatctcaagtcccccttttcctccatgttcgattgttaaatatagaaataattagcccctacttcatcacatatcatgtttaatatttaatattagttcttcttctctcaagtctcagaggattattattacagactttaaatgtgataattctcctagtatacatttttactttaattagcttatttcgactcaaaaaaataatattccattgacaattgtctcttgtaaatcttaatt

SEQ ID NO: 358 - protein, 450 aa, Glycine max
MPENMSISVNGQSQVPPGFRFHPTEEELLQYYLRKKVSYEKIDLDVIRDVDLNKLEPWDIQEKCKIGTTPQNDWYFFSHKDKKYPTGTRTNRATAAGFWKATGRDKVIYSNGKRIGMRKTLVFYKGRAPHGQKSDWIMHEYRLDDNNTTDTNIVSNVMGDAAQEEGWVVCRIFKKKNHLKTLDSPLASGEDRRSHLFDSCDEGALEQILQQMGRGCKEESSYEGNYNSYGRFTRPYETTAANNGGGYNDRFMKLPSLESPKSASMENHHNTNNNNNMNSNNNNNGDNNENNNNNGYHPIIPVEMGTDNEGTFTTHQVSGGDPNNNNNNSNIVHPLEVGSGGGGLTNWAALDRLVASQLNGQTDASRQLGCAFNDPTMYCTSVDHHDLHHQIPTLRSSSTSANTRPSPAPAFINPPTQDFTSEIDLWNFSRSTSSLLASSEPLCHVSNTSV

SEQ ID NO: 359 - DNA, 3287 bp, Zea mays
tgacaacctgttactggatcattgtgatttttagcgcgaatagcacgagcgcaaaacgatatcaggtacttacaattgtttgcaaagtgacgaagaacatacaaggtgacatgaccacaattgtttgcagtgttgacacgagtgggctcacacaatagacaatacatatgtcgcacttcgatcccgtcctcttaacaaccagagcacaggaccgcatttaccatgggggtataccgtgttcgatatcaagaggccgcggtgcggtgctttgaccggctagttgtcggattgcatgctcctgagcatgttcaggatggagaggaacaggttcaggatgtcgaggtacagcccaaccgacgcccagatgtactcgtcgtaggtgtggcgcttgatcaggttctcggtgtcgtacaggatgaagcctgagaagaccagagcccctagaccaccgaacaagcccaccgacacgggtcacagtgggaagaaaacctgcagcgcagaattccacacagaaccaaataaaagtttattgtgcaagcagtggattgctcgtctggtaacaaagcatcattcgcggatatacagagcgcgtttctttcagagcttgtcgtaggcattacctgaagaaagctagttaggacgaggatagtaagcgcggaagacaggataggccccaggtacccgaattccttgcccttctttgacgcccagaaagcatacgcagtcagagaaaccaccacgccagccgtcagcactaaagcctccagaacgattttcccttgggtgttagcacaagccacgccgatgctgaagctcaagcacaacgtgaacagacccaggaaaacggaattgtgtgggtgcttgtgctgataatgatacaatgggatcatcaggatgaagggcaggacggcgagcacgagcgcgaggcccggggagtcggagagcgtggcgttgagggtggggtggagaacggtgagggcggagacggcggtggtgaggagcagctgcgcagcgaggatgccgtagaccttgcggacgaagccccatcggagggcgctctccccgcgcgagatccccgggtacagcgtctccccggtcccggcctccaggtccaccaccgacgcctccaccttctccttcatctccggcgcgcggcggtaccccgccggcgcgaggggctgcatctccgccaccgatgccatctctctctccgacgggggttgggtgcggtgcggtgcggggaaggggaaacccacgcgtccgcccacgcgtccgcccacgcgtccgcccacgcgtccgcccacgcgtccgcccacgcgtccgcccacgcgtccgcccacgcgtccgcggacgcgtgggatcgtcttcctcccctcacatcctctggcctctggtcctccaccgtcctgctagccagagctgctcttgtacgcgcagctggcctctgtgcatatcaccagcacaccgcgcaggggaaggaaattaacaagagaaaaggcaaggagagcaggcaggcaaggaagctgcagaagccaaggaaggagaaggaggatcatcaatgagcatctcggtgaacgggcagtcgtgcgtgccgccggggttccgcttccaccccacggaggaggagctgctcaactactacctccgcaagaaggtggcctcccaggagatcgacctcgacgtcatccgcgacgtcgacctcaacaagctcgagccatgggacatccaagagaaatgcaagatcgggtcgggtccccagaacgactggtacttcttcagccacaaggacaagaagtacccgacggggacgcgcaccaaccgcgccacggccgccgggttctggaaggccaccggccgcgacaaggccatctacaacgccgtcaagcgcatcggcatgcgcaagacgctcgtcttctacaagggccgcgcgccgcacggccagaagtccgactggatcatgcacgagtaccgcctcgacgaccccgctgctgctgctgctgctggatccggtgatgccgtggccaacgacgacgcagccgccacggctgctgctgctgccgccgcgtcgtcggacggcgggcaggaggacggctgggtggtgtgcagggtgttcaagaagaagcaccaccacaaggagtcaggtgggggcgggggcaacaagcacggcagcagtaacagcgagcatgggcacggcggcgccggcaaggcatcggctgcggctgcggctgcggcgcaccagcaccagcaccatggaggcctgcagtactcctccagcgacgaggcgctggaccagatcctgcagtacatgggcaggtcgtgcaagcaggagcacgagctggtgtcgccggcgccggcgccgccgggacgggcggcggcgtccaggtacctccggcccatcgagaccgttctgggcgggcacgcgttcatgaagcttcccgcgctcgagagcccgtcccagcgccaagcccaccaccaggagcgcgcgagtacgccgccgccggctgggacgacgacgacgcgctggaccgcctcgccgcctacgaccacctcaacggcctctccaacgacgacgcgtccaagaacatggccgcgttcttcgacgtcgagcctagcgccgccgccgccgccgccgtggacggcgacctgtggagcctcgcacggtccgtgtcggcgctgcacgcggacttgaccatgaacaacgtctagcttctgggtcccgaccaacaacaacagggccccgaatccccgatacacatccatatggcgtgtgcacgcatgcatgcatgcattgcatgccgcgcgcaccactaaccactcgaccagcatgcatgcatacgtgcgcaccccaccggcgcccgcggccgctagtgcgtcgtgctcccgtagtgcgtgcatgcatggccgccgcacgtacgtattgcacgctcgctcgcgcgtacgtacgtacgtgcgcgaataagctagctagccctaggatcggaaacatatgtatgcatccattgcatggccggatatacatcaggagctgctgccgctggtgtatgtccgccgccgtccaaactccaaagtgagctgagatcgatcgatcgagctcgctcgctccaggtgtgcagtacgtacgtacgtaagcgcctgtgtatgtgtaagcagacagcgtggtagtagctctagctagtagaacatacttacacacactatatactgcataccgtttgtacctatcatatatagattactactgtattattgcaaaccgctttggggggttttaaaaaaaaaaaaaaaaa

SEQ ID NO: 360 - protein, 376 aa, Zea mays
MSISVNGQSCVPPGFRFHPTEEELLNYYLRKKVASQEIDLDVIRDVDLNKLEPWDIQEKCKIGSGPQNDWYFFSHKDKKYPTGTRTNRATAAGFWKATGRDKAIYNAVKRIGMRKTLVFYKGRAPHGQKSDWIMHEYRLDDPAAAAAAGSGDAVANDDAAATAAAAAAASSDGGQEDGWVVCRVFKKKHHHKESGGGGGNKHGSSNSEHGHGGAGKASAAAAAAAHQHQHHGGLQYSSSDEALDQILQYMGRSCKQEHELVSPAPAPPGRAAASRYLRPIETVLGGHAFMKLPALESPSQRQAHHQERASTPPPAGTTTTRWTASPPTTTSTASPTTTRPRTWPRSSTSSLAPPPPPPWTATCGASHGPCRRCTRT

SEQ ID NO: 361 - DNA, 923 bp, Glycine max
ggcattggatcatttgtggcttgtaccgaactctgaatgccggagatgaagatgagcatatgtgtgaatggagaatcccaagtccctccaggcttccggtttcatccaaccgaagaggaactgttgcagtactatttgaggaagaaggtgtccaacgagaagatcgacctcgacgtgattcgcgatgttgatctcaacagactcgaaccatgggacatacaagagatgtgcaaaataggaagcagcccacaaaacgattggtacttgttcagccacaaggacaagaagtaccccacgggaagccgcaccaaccgcgccatcattgttgggttctggaaggccacggggcgcgacaaggtcatatatagcaacgggaagataattggaatgagaaaaacattggttttctacaaagggcgtgcccccaatggccaaaagtctgattggatcatgcatgaatacaggctagacgacattaataacaccaatgagatggaacacgggtgggtggtctgtagagttttcaagaagaagaatgtccctctcaaaaccctagatagcccaaaatccatgaccatgaatatgtttacagaaagcgactactgtggaggcttcactaactgggaatcccttgatcagcttgtggcatcacaactgaatggacaaactgagacatattgcagtgatttgcaattccccgcatttctatcatcctcatacattgctacaacaacacacattgctcccacaatacaggattaccccagctacgacattgacctgtggaaccactgtgcttcgcgcgtgtccaacactccaaatgtaacactctaatcaaatccttcttttaatttcttcccatgtcagattattactactattaaatcatccctaaaatattcattttcaaaaaaaaaaaaaaa

SEQ ID NO: 362 - protein, 265 aa, Glycine max
MPEMKMSICVNGESQVPPGFRFHPTEEELLQYYLRKKVSNEKIDLDVIRDVDLNRLEPWDIQEMCKIGSSPQNDWYLFSHKDKKYPTGSRTNRAIIVGFWKATGRDKVIYSNGKIIGMRKTLVFYKGRAPNGQKSDWIMHEYRLDDINNTNEMEHGWVVCRVFKKKNVPLKTLDSPKSMTMNMFTESDYCGGFTNWESLDQLVASQLNGQTETYCSDLQFPAFLSSSYIATTTHIAPTIQDYPSYDIDLWNHCASRVSNTPNVTL

SEQ ID NO: 363 - DNA, 1455 bp, Zea mays
ggtcgtctaaaaaagcagcagctgctcttctcttctgctagcagctttatttgcctgcctccctaccggcgagggaggtacgtgcgccgatcgagaagcagcagcagcaattaataactaaacatggatcaggcggcggaggagtcttgtgttcccccaggcttcaggttccaccctacggaggaagaactggtgggctactaccttgccaggaaggtggcctcccagaggatcgacctcgacatcatccaggaggtggatctctacaggatagagccatgggatctgcaagagcggtgcaagccgcagcacgccggcggtgggcacgacgagcagacacaggagtggtacttcttcagctacaaggaccgcaagtaccccagcgggacgaggacgaaccgcgccacggcggccggcttctggaaggccaccggcagggacaaaccggtgctgtcgtcgtccaccaggaccaccaggtgtagcagggtcatcggcatgaggaagacgctggtgttctacaagggcagggcacccaacggcaggaagagcgactggatcatgcacgagtaccgactccaatccaacgagcacgcaccggcgcaggaggaaggctgggtggtgtgccgcgctttccagaagcctatccccaaccagcggcccttcttccccaccagctacgccggctactacgaccacaacctctcaacgacggcacggctgcacgtagacggcgaccgccatttcctggcgggctcatcagcagcagcagcagcactgctacagcagccaccagggcttgcaggcagcagcttcccgcagctgtactccgacgacgacttggagtccaagaagcagctgttgagtatcccgccgctggagagccccactgccatggcctgctgttccgacgccggcggctacgcgcagagaagcagctacgatgaacatgagatgatgatgatgatgatccagcagggaggaggaggaggagagcaagctgcagccgccatcgactggaactttctggacagcctgctgtccgcgacgtcgcaactccatgggccctcgggatccttgttgcagtgacctccggccatcgtcgatcgatccatctttctttgatccagcggagaacattattcattcatcggcattatacaatatatttattagttgcatacacacacagagtatacgtatatgctaataattcagatgtgttcatacacacttccattgtcatgtgtagttcgttgcgacttacattacagactgccttagatgattcaggtatactgtatacaacatgatgcacagtatagtaggagtaagtgcaccagtctcagcagctggtagctagctagctatgtaaaattcctccttaattacagctatgtaacatatatatacagttattattacttactgatatgatctatctatcaaaaaaaaaaa

SEQ ID NO: 364 - protein, 320 aa, Zea mays
MDQAAEESCVPPGFRFHPTEEELVGYYLARKVASQRIDLDIIQEVDLYRIEPWDLQERCKPQHAGGGHDEQTQEWYFFSYKDRKYPSGTRTNRATAAGFWKATGRDKPVLSSSTRTTRCSRVIGMRKTLVFYKGRAPNGRKSDWIMHEYRLQSNEHAPAQEEGWVVCRAFQKPIPNQRPFFPTSYAGYYDHNLSTTARLHVDGDRHFLAGSSAAAAALLQQPPGLAGSSFPQLYSDDDLESKKQLLSIPPLESPTAMACCSDAGGYAQRSSYDEHEMMMMMIQQGGGGGEQAAAAIDWNFLDSLLSATSQLHGPSGSLLQ
